United States Patent Application Publication US 2026/0015631 A1 - sequence listing, part 2

SEQ ID NO: 4099 - protein, 363 aa, synthetic construct
  REGION 1..363: note = TnsF-Tn7 System Protein
MKSNDKIRICNSCRNSEYKTCQRCRRYRPIFAYDIDGYICRKCKEIGYIKCPECNDEMPAGRGKQCELCYKKTLFKKRVLICLECLETPEIKNEWITFSEWLLTYKPINQIVSKINRYIKLFQYLDSNHQKIPSQQILASELSITTLRRYLYFKQWLTYLGRYNLSELDQSLISDTLHIQNTLNFFPFGTQPHRLINTYYTELELKKDAKKLKTRTIRQNLSTALKLLKIAVNLDLKQPNTRCFKLALKDSPGIINTLKSFAHFLETAHSIVIGDFKASSKNKRVEKLEATLIAQLELRNKPLDITIWVQYGLEYFHGVSPQSFTKTQSKLAIVKQDESGILVKLDTLIYWLPYPNSVVKKAE

SEQ ID NO: 4100 - protein, 655 aa, synthetic construct
  REGION 1..655: note = TnsF-Tn7 System Protein
MLLHILNRVVLLYQLPTFEITSFVSQIKLHNPCFENDFQKWIVWWYAGIYKNAKNNSAPHVEVIFRELKDDGSLGERTLSKKVLIPLLGQLFLGSIWMNNRCNEAIKLDKKSFSVNLEPDNWIVRKVADYIELPVFKNYYPINVDGNSTLISFKLLNGGELLIPCQEYFSRCYGRSQEIKRIIATYSWDPYGYNGDSNPDSVQGRIFAKLREPEENNRWKVNLGKTLYNDDIVLAAHLKYDKYTQQKVKSIHTQLEVSFRKSIEKPAFIKIFPWHLGMQNLEVEGVPFDDGKSFLALRINGASDPQGDDISRQRQNTNLTRENNPLGPKGGWNTQPPKTERPIVNVTDEGRPDSNSEIVRLSDRRFRVLGIPRRIKDVHLDKAKTSGQKRNLPDPSGKSSQGDPSGNNKGIGNTSLGAPQIYESEGKLNDLWNTLNIMASDKHYGRYITKVQWYVYDQEFSSEEPIQLSSFSPAKEEDLDNYKHLKIDPSAAEDKNKLLLAERRKVLHWSYIEAEENGLKNARDKYFRGCLILKIIVRGRPIYLLEIERKVELVKGEQEQSKEKESFSGMVFTIQNDTELKKWAHLLLTELPIFKGVVAKVMVKCPGTADKYPHRSASWEVWPLEATVINAFKKIGISIPHRKLKVGIKGNDAKG

SEQ ID NO: 4101 - protein, 222 aa, synthetic construct
  REGION 1..222: note = TnsF-Tn7 System Protein
MTMTQVRKIGPTRRSVSGSYIFQGHSQIDFESTLERDFLIRHEYAPNILDIIAQPCEIPFRINNKRIYKYTPDYLVYSKLGENSYHKYPKPLLVEVKPMTQLLTNWRDWSSKYKAAISFAKEQGWSFRIFNEARIHDQLYKNARFLEPFSRMHFCEQENAELLKTIREMGCVKLNYVLNRHYCGIYKAQGIAQLWQLIAKRFVSCNMQEPLNENTIIWMEDL

SEQ ID NO: 4102 - protein, 630 aa, synthetic construct
  REGION 1..630: note = TnsF-Tn7 System Protein
MSDELSYQIERTPINLTVGNYVKFESEHFKISELIDFDQIIGISTSDGRAKLLRIKELSPIEENSSPSDTVDLQHISDPDWQVAQKRYSIIKTLLEFPQYGRHEVTKIAEQHDINTATLYRWIKRFNTSGNIISLVPKKRGVQSGDWRIEHEKESLIQEVIQDYYLTKQKVTVQATVDEVKRICHLRNIEPPSPSTVRKRILAIPEKESLWRRGQKEKAKNKFTPTAGQFPNADYPLAVVQIDHTPADIILVDDEHRLPLGRPWITLAMDINTRMVVGYFLSFDPPSETSLSMCVSHMVIPKEDWLILHNVNADWPVWGFPRTIHVDNGADFRSNNFKKSCATYGINLEFRPVKTPRYGGHVERLLGTLLKEIHKLPGTTFSSIKDRDEYDSDKNAALTKSEFEEWLVNLICRVYHQKEHTSLGMSPIKKWEIGIFGSNNEPGIGMPPRHNDKQKLMLDFLPVIYRTVQSSGIQIDKIFYYSEALRPWINAEDPVTNKKRKFIFRRDPRDISVLWFFDPELKQYFRIPYADQSLPGMSLWELEIAKKKLKEQGNTSANEAQILNALTYMREIINEASQKTKKARRQRQKQTEYAKKLEPTNPLKSKIPIKTSDSAALVLLDNIDSFTDIS

SEQ ID NO: 4103 - protein, 378 aa, synthetic construct
  REGION 1..378: note = TnsF-Tn7 System Protein
MGQTYTWHQGNIPVNPKWLLTTPLQPNEIFSSWIIRLALKNGVSPLAIAAYFWPEKRIWTSDIDRGISVEQLKELAVQTGLVSQKIRLSFLDNIFIDKITNELPVHGSWPWLLPLGCRNLRRSIATQYCPICFSTDRAPYIRLSWRFAWHTCCEHHHVKLQQTCQQCGAYFLPHKLTPDATSLACCYLCKTNLTTHNLSTSCNPSALKMQNTLDETLHNGIGILGKRITCTSLDYFTVTHLLLQVIRKANNSPESSLSQIVFKELGSTPKVSDLNEGIAYEASNFTLREQLMAQCYHVFVLRFDEFFVECSKAKLNLTSLFDSRQVIPSLLEQLLFDLPASKKKYKKNRLNKNLRPKSKIAVQRKWMRLLRKYHMKKQ

SEQ ID NO: 4104 - protein, 708 aa, synthetic construct
  REGION 1..708: note = TnsF-Tn7 System Protein
MGIYHNDQPIHGGPNDPDLLNRLDFANNLANVLLLNNDDDCLTVSLEGEWGSGKTSVINLVKGALNEKESTPIIIEYNPWLAGNPESLIQDFLLQFSSQLNVKDSSEVTLKAAKELIAYSSLFSVAKLVPGAEPWASIVEKVFSKFGSSAKKIAELKKLDLLGKKKKVEAAIEKIKTPIIVIIDDIDRLTPSETFQVLRLVKAVADFSGTSFLLAFDSKYLVSVLGKNDVMNAPEYINKVVQLRVPLPVISDRGMNELATIELDNLSDKNLTDRFEADQERLSWIYHHYFKHLVRNPRELKRFFNHLRFILEQVEGQVCFSDLFSLSIIATKANSAYEHVKKTPEAYIGKRFSNDGLMMDKPEDVVKSFSKERGEILSEFNERDRKLLDGLLGNTFPLLDSDGYSLYGVSDADSAGRVSALQRLHVALHYKTPIGYLSDQEILNFISGDIDRDDFLNRVITEDADDRFFEMMTNYAKECKVKSFDVLTSIYDAYLKSEKLITSLKSNYGFMSRDLYRQLNWLTNKVISESEDKYTLLKKLIGRQDSVPMAADVLFKIRGQIRGKNNYGERWVIEEQLEEFETLYQQIAIKVLLDKTYIDNYLESHILFELKRSSIDKTSEFLNKIMNGDNGTIRVAEIIGNTGSDSTNGPYVQISDEVFSDIIDLKTLKEQARKIDLANQPTHIQAALKSIINGKMYYLRDGELGERY

SEQ ID NO: 4105 - protein, 708 aa, synthetic construct; identical to SEQ ID NO: 4104
  REGION 1..708: note = TnsF-Tn7 System Protein

SEQ ID NO: 4106 - protein, 295 aa, synthetic construct
  REGION 1..295: note = TnsF-Tn7 System Protein
MNLDHIHPDFRHIINLSDKERINFMDMPRWIGYSKAKETLDTLQGLMLKPNKPRMRNLLLVGDSNNGKTTIIRRFFDLCGEAYVNENQDPVKPIILAESPPSADEKSLYISLLEEFFTPYRATDAKAKLRYQVIHLFRSCKVNMLIIDEFHSLLTGSPIKQREVMNAIKLLCNELAIPVVGVGTKESVRVLHTDPQHASRFDVLSLPLWELDVEFQKVLGSFEKVLPLKQPSKLHTPELAKLLHAYSGGNLGDLHRLIIECATEAIVSGKEFIDIDIIKSKSWVRPTRGIREISL

SEQ ID NO: 4107 - protein, 295 aa, synthetic construct; identical to SEQ ID NO: 4106
  REGION 1..295: note = TnsF-Tn7 System Protein

SEQ ID NO: 4108 - protein, 468 aa, synthetic construct
  REGION 1..468: note = TnsF-Tn7 System Protein
MSTQDRTPSWPDEQLCNSCFYTAMRTRGICPICGHDGVLPGRTNRTDPRPICLSCAGIPRNYRCTTCDIEGQIYRRGQCARCALREDLGALIVDGAADPAAMGAIVEILCGIDRPESVLTWKRSSKVRALLAGLASGEIPLSHEGLDNAGKGTYISHLRSLLEDNGLLAPRDEHLARFEAWLASKLDAIPAPGIRAPVEQFATWHHLRRLRRHAAPGQASDGPRRIAQQQITETIKFLTWLHEHHHRTAASCRQQDVDEWLATGPTTRHKIRAFFAWAKKSKINTAVRLENRQAKTIPLLTQDERLAWIHELLTGDTESLPYRVAGILLLLYAQPLVKVAALKTTAVDVTDDGVRISLGAAPAPVPVPFAEMLTDHLHNRTNLRTGAAMASNPWLFPGRNAGKHLDPQTMQMRLNDRGISVLGARNSALQNLVAEIPPPVVANLLGYSHTSTQYHAQLAAQPWARYVI

SEQ ID NO: 4109 - protein, 254 aa, synthetic construct
  REGION 1..254: note = TnsF-Tn7 System Protein
MTSRTSTKVRSVDEPAAELWWFVRFHDGDVIEWCWRDSGAPPLDELAAIRTPRSSSRNRHIPVSAYSMTNAAVLHLESGLEHDLLRRLDRDPTIRRMVAQPLRLQWTGTEPASHTPDLLTVDDSGAVTVWDVRALDEQDDDFRAKSRVTRDACGIAGWRYEVFSGLDIIERMNLLWLHGFRRRPPWADRYEDAIRTMASAGKVTLAALFGADDGSEEVKPVVWHLLWAGDLCADMNAPWTPHTEVTLGSGVRHD

SEQ ID NO: 4110 - protein, 468 aa, synthetic construct; identical to SEQ ID NO: 4108
  REGION 1..468: note = TnsF-Tn7 System Protein

SEQ ID NO: 4111 - protein, 350 aa, synthetic construct
  REGION 1..350: note = TnsF-Tn7 System Protein
MDAQLWHEHCVTEMPVEPPHLTVTQWNALTDGQRDDHVDRLSRWLANLFVATIEADAIYRKMTKTVQANAYSPPGAKRLPALSGMNYVGKSTMMMRWARERYLEWIADAEKDDDGHPIFRPASGCEADLYPIVWIDLRAAALIKDVVGEILDFFNLPSDGDTRHVSEAAISAIRRHRTRVVVIDDVHLLKTNWKGGRDVLDYVKHFNTRLGKLGVSLVLIGANLEGSDLATDPQIASRLRLDHLQPYPCERHDIDHMRRWQAIARQLENLVLPHLPRGKPEMLFTKLAQELHDRSQGYIGDVTELVTEATIEAIHDGSFRIQRKHLDRVELSKRAEDEYRDRKHPPKRAS

SEQ ID NO: 4112 - protein, 350 aa, synthetic construct; identical to SEQ ID NO: 4111
  REGION 1..350: note = TnsF-Tn7 System Protein

SEQ ID NO: 4113 - protein, 557 aa, synthetic construct
  REGION 1..557: note = TnsF-Tn7 System Protein
MTVGRRRELLPFRVSLGRGEALDGFLERLADANGLRSAEIIRRIKTMSGPSAPTTAFMMFKPDPQLIERVQRLSGITGTSLANATLRRFDLGLPLFLEGLDPLARHTFRQVVTQGWFPQFGSQTCVECIAQDGIWRLEWRLPIVATCIRHGIFLTAQCAGCDQRFRTHRYAVLRPIIDASQPCGNSLGLRTQCRHSVSAHARVPADPRVLATARQIDHALRGEPTAMLGELTNPRLYLAELRHLATLLLHLLSRPGGVAYAGWADDIHREAITRTTDLRGPRWGISPPSSAEARGQILAEAQVILEQDGLAAAADHLAPWLSLIDDTPNGPTGWLRNHTKRTPTMGRLIDASLSRRHHVGRRLGNRPAVAALSPDAIPQLVDVEIYRDLFDGMLGSYEWTGRMYVSLCLVRAATNASTWAEAATAIGLDPTLGTSTARAASSRRCVSPEVFTGAVRAAELVLPRNRDFRERESRVRALANPSSTAREEWCTSVSPHRKRTTWSYALTWMWCEVAQGPLDTSPAWAVAPSSPVKAAYRAFAARLTPSTRDELRLLASR

SEQ ID NO: 4114 - protein, 583 aa, synthetic construct
  REGION 1..583: note = TnsF-Tn7 System Protein
MPRRRLPLRIEPLAGEAVDSWLEATAAHMDMTVGVLARMVGLSVATRPAWIRWIGPDELNALEAATGVSGVSIQSMTLQAYDTRALGLQPISHRLDPAFPFGALPRSRFCPRCLRATQGRWQLGWRLGWSFLCVEHRCLLVDVCPNCGKHQRRQQNYSRTPTPTKCACGCDLIGVRSQTLGDEHPFVEAQRVVSEIIAGEVATFGIFATMHTSAREALTQIRSIANRVLNYASIHGLEAVQPSELTDGLRADVIAGKPSQARHTLNDSAPARAVDTAIGVSAALSILRLPDVSRAGVSARWIVDGQNADTGPAELRSCGRDGALSAAIAIEARRPALGPELQLRYRAAVTMPCAPDIDLPRVSSIAASLPSVLWREWSDRLLLDVRRTLAMRRTLSCATLLVGSTVKPVAAARLLGEVITPNALNHRLWVLQGSAYWLPMCAALIRLSDYLDANGALIDYGRRRRLDYSTLLRNDAWQQMRRSDGSQLRIRSVAAARSYLVAELGGSARRDTQDVVSVAAFEKALTSDLRTTLAVRAQTFLFEQGIDEPVSWHPPLGLLKDLALPQPKMTRVGTHAQQTQCAG

SEQ ID NO: 4115 - protein, 369 aa, synthetic construct
  REGION 1..369: note = TnsF-Tn7 System Protein
MPVDRSGRVYVVGSVPLLHPEAQTVEEMLEGWRNQQLCRNLHHETIAGRIRIVERFVDVTNEFPWTWTPAMAEEFFSDLRAIHRRKQSTIRGYQNALKLFCSYVSHPDYGWDRVCEQRFGTHPAQVFFEWNTATHVQDNEQSPEKRAFTKAELQDFFDHADDQVALIAASGRKGWLPAYRDAVMFKIAYSYGLRCNEIRHLQTVDFSRNPRGREFGRYGVVQIRYGKAKKGSPPKRRSVLTVFDWTPEVIGDWLVHGQPCMDDGIDLFPSEKGALVAERTLLRRFRRYCDDDLQLPGGLDLHSLRRSYATHLIEDGWDAKFVQDQLGHEHASTTSLYTCVSSDFRTRTLRRALDTTINEALSFDGEESS

SEQ ID NO: 4116 - protein, 714 aa, synthetic construct
  REGION 1..714: note = TnsF-Tn7 System Protein
MTSVRTVLVDGARLLTDSGTAQVLSVDDSGVGLRYSWGDASTISWADLGTLRSIEDGIAEALSEPLQPVWDGLDEAIRSAALTRLEIVQEIITGYRDGHPAFAREGEPRSPFGPGFGVSEHKRCIAMAKQLNLEAKFDRDLQRRLAEGDLKSGGVSEQTIRRWVREFKRDGLLALIDGRTVRPSKSYDRIDQHYRDAAIKVLDSLDGDRSTISIEEIKRQTEVNLKNSGLAHIKPPERITRQYLSNLKRERGDSTRAQLSRRLRHVSGTKHYPAIRPGQVVAIDATRADNLVYDPYTGKPYSVEILTAVDVATRVVLAIRVVARSANGIEAGLLVYDICRPFSMMVDGTSIGHWRWVGLPEQLDFTQVPVRAGQRLFAPDFSTLQGEHGIPSVLPDAIRSDHGAIFVSKHFRALLDNMGIDLLLNRGGKANDNPHVERWHETVQRALQQIPGYKGRNTSERGRLVSKEPMLTATELEQHLRRFIALDYHRSGHTGIIQPGQEDARVCPLEMWDAMVSMTGRIDVPQRPDLIYQFLPVRWATISHDGVELKNLVYDSPVLADYRSKRVGQFRAQDEKAPFFVDPRDLSRIWFQDPATKLVQPIEWRGIDRTQAPMAAAIVGHVCQRIRERGGNKVLNRNSATRQIIDELTQITEAPVGPKLRRKLTASRLRVEQARVDHGEAQAAQERVHPSPPLRLRPAGRNEEWPNYLLDEEA

SEQ ID NO: 4117 - protein, 116 aa, synthetic construct
  REGION 1..116: note = TnsF-Tn7 System Protein
MKREVDYTWRVAELMAAAGMHNSTDLIPRLAERGIQLSRPQVYRVVHQRPERVSLQMMAALCDIFGCGVEDLITVTASDVRRKKASSAAATSSARNVVEINKSVRPRRARVLRDDD

SEQ ID NO: 4118 - protein, 662 aa, synthetic construct
  REGION 1..662: note = TnsF-Tn7 System Protein
MTIPRGTPQPDGVFGLRVAAALAVKGVIAPEQVVIDAAEKIVRAGARNGALRLLTSEQFDPHELHAETLREVQMLLASLARDGATGIGLPLCPSCRTRKVVKARNEHGERECFRCTQRRSYGECAQCLRMKKLTAINADGQRVCQRCGPEGIPTFACESCGKTVTTVGRVDGRRVCLNCLPPRLRRCVSCGQQKKIAATILHGPHCFACHNRILRNAAPCPGCGQKRILAFLSEDDHPCCAACAGQPPRYACRRCGSEEHNYGRLCGKCVLSDRCDDILTGPDGEFLPPMQALRDYLLAQPRPAQVIKWLRMEPSTDLLRDIASGRASIDAVLDTPRPSKPLIYLRTLLLDAGALPRDTAATRQLMAWAAQTISEAPAEHHQMLRTYTRWVLLRRASRNDSGDIPIGAARHVKASLRGLVAFLTWIEEQQTPLASLTQAQIEEFITLRTARRWLPQFLAWAAERDITPDLGIATLPRREPTISTSEEQLEHVIRILATDRTIALDARLASLLIAVYGLPASKVLLLRRNQLRDRDASLDLLIGDRPLALSDPIAILAREQLDLLAEPTPDGWLFPGLRPGQPRDPQYLNRRLRPFGVSISELQNIARFRLAGAVPAKVLADMLDFSVATFENYARLSGSTRGDYPALRGTAPAALRKGPKIQ

SEQ ID NO: 4119 - protein, 662 aa, synthetic construct; identical to SEQ ID NO: 4118
  REGION 1..662: note = TnsF-Tn7 System Protein

SEQ ID NO: 4120 - protein, 367 aa, synthetic construct
  REGION 1..367: note = TnsF-Tn7 System Protein
MSEDAEVLLLRQPGVVPLHEDAAVFSGMLDGFSRQQTSRGLATQTIQMRRWQVERFQRFADSYPWEWLPGDIEDFTTSLFSGPRPLSRSTVRIYHLTLRAFCDFITDQRYGWVAECRSRFGSVPTQVCFEWNTVAHTVDFEGTPGRRPLDYDELDALFAVADARVETLRRQGRKGALAALRDAQLLKTTYAWGLRRREVLGLDVVDLRTNAKTPQWGRFGLLHVRHGKSSKGSIPKRRSVLSLPEFDWAINGLRVYVEQVRERFNPGNHPGLWPTERGTRVGDRYLDRRFAQLRDEAELPAELTLHSLRHSYVTHLIELGYAEQFVQTQVGHAYASTTAIYTSVTDDYRNRVLAAAIDKFYFPEGST

SEQ ID NO: 4121 - protein, 109 aa, synthetic construct
  REGION 1..109: note = TnsF-Tn7 System Protein
MTTKTITWRLRTLMAERGMFKTTDLLEPLKAEGVALSREQVFRLVTQTPQRLNVEVLAALCTILDCTPSDLLVLEQVAARPAEATGTGGRIEDIGDLRPVPARITRPKP

SEQ ID NO: 4122 - protein, 734 aa, synthetic construct
  REGION 1..734: note = TnsF-Tn7 System Protein
MSVETAQRLLQQAHAWEGRNARELDVYLSEHRDAFIAPSPHCPVTVLRLLTLLTDNGFGDKVVLLGCVRCGRTDQFLRRRTPDGRCCVRCMERVERRACARCGQIGRIVARRQEGRICRACYSLDPARRSECSRCGKLAEIISRGEDGSPLCNRCASRPKRPCVHCGRVRIVGANTDKGPACKSCHASARPRLCGICGQVRTIQRRGDGKGRPDMCQRCCREVGECAGCGRHRFGVRFRGGPFYCSTCYPRSKRSCAICDEMKAVAAVWPVGSVCQRCYRTRLEHPDTCAECEKDRILVCVNGSGDAVCTRCGGVDLNFACRSCGEEGPGFRDGRCYRCLVLAKIATLLGDEGSAGDARMKPMFDALAAVSPGSVHTWVVNDDSLAVLAALVRAGRGITHEEIDKLPQNRRTRHIRAAFVAAGVVPQRNEALAQLQLWVDRIVPTLPAQHQPVIRAYAEWHLVRRARLRAARRPFRPGADASNRQRIRCAINFLSWLADEGASIGTLGQHHVDTYFDTRPSKARALGTFLAWMQARRLITGIEVPRRKGGLPQRFQDHDEHAEQLRRCLTDDELPLEFRIVGALVRLYAIPVARIVELTYDRFHRDDTHAYLVIEQNAVILPPSLATLIEELIRVRRSGGRAYSGPGVPALMFPGMPPSRPRNTNALHRNLKKYGLPTLAARNSAMIANIVDLEPVVVSDLFGIAPQTAHRWAQYAQTSWATYLAARSSDTQPL

SEQ ID NO: 4123 - protein, 734 aa, synthetic construct; identical to SEQ ID NO: 4122
  REGION 1..734: note = TnsF-Tn7 System Protein

SEQ ID NO: 4124 - protein, 341 aa, synthetic construct
  REGION 1..341: note = TnsF-Tn7 System Protein
MLEGWRRHQSARFLRETTMVRRLRLISRLVEFTGLYPWQWTPAEGEAFIDHLRNLDPPRALSTARGYEIAINLFLEFLLDPRYGWASVCEERFGEVPQQIFHDGNSIVHRSEYEGDPRRRPLTYDEIQALFDAADARPGKIVGRGVKGGLGAARDAAVLKLVYAFGLRRTEASKLDLVDLRRNPRMAQFGRFGSVMVRFGKSSKGSAPKRRSVLLVPEMDWIIEVLEQWLTELRPRFSPGAHPALWVTERVGRLQPRSINDAFVAAKRDAGLDEHLDVHCLRHSAVTHWTEFGYPAKFSQEQVGHSHAATTAIYTGVSNEFRNQMLVASLKGRLGTDWDVT

SEQ ID NO: 4125 - protein, 108 aa, synthetic construct
  REGION 1..108: note = TnsF-Tn7 System Protein
MNKKMGYRWRLRDLMADQQMFQTSNLVPLLAERGITLSREQVYRLVTQPPQRLSMDVLVALCDILGCSPNDLIEPEVVNQQVRKTVGAESDSVNIEPRRSVIRRPGRK

SEQ ID NO: 4126 - protein, 268 aa, synthetic construct
  REGION 1..268: note = TnsF-Tn7 System Protein
MDNADAKMAMGRFTRWLCDRRGAHFAALNMHRYQPFLEAIYRQWKAAPTYADLVSHFGAQALRRSLSIVRWMEDESMLVIDADLRAQLIEQRRIQQALRFFDDGMAKAALLRFYDEMISRAVTLRTVRLSLGSALRLLYQCDRSGQQLPTQSGLKQLLSKRPGLYCSLYGFVNFLNRQYALSLDARVDPEWFANVTHLARERCFRRVYAAVVNGGGSEQQWIRAAMGYLHGVKHLPSMLVYREQAEHEQPGFIVTYRGVDFWVPDARP

SEQ ID NO: 4127 - protein, 573 aa, synthetic construct
  REGION 1..573: note = TnsF-Tn7 System Protein
MWENDSALPMGTWVVWWYGRLVKNTAAETVPLVEVALQKLDGDRLTSEYGTIKIAVSRLLFYPRGLILEDRRPVARAAVESHWFDVEFGYSGWSFFRASDLGFCSSNSEFRLPESCSGDWSLAFKQAKGTVLLNCVDYLVRGYAHRSEIPRILTTYSWGPAKRRLLAKSTPAEEQGLSDRLVVYPHPDMVSADETFLAYLANDSHTIKAAQSIFADADTQAFRSGQPHTLQVMPWFKGRTRLQCRGIWLNKGQDFLCLELLAFDAPKGKLIDCRISRRTKTEAAVDDWVRSKEIQRKLTEDDMDFCMTDFHQPRSPYPRYDLEAGDLSAGVDANKIRSYVDAPYDRTITVPNDRPAPDKVSTGDTLGSGDSDTAKATVTASAVEAEFSGALQEMWKSFLRLRAAGLLQNVRWYAPLQAIASRPPEYIPFSERNYDEPEDPQGKLRKWLYLHDTKCRGMMIFLLWTSRQMYMVVETERRRWVSKDGDLKEESCSGLICLVENKEDVQKVHQFIDRGLPRHKGIFAKLVKESKWPLDGPYAIFPHRTQNDKDAWLDAAALNALRRMGVVVSTPIT

SEQ ID NO: 4128 - protein, 268 aa, synthetic construct; identical to SEQ ID NO: 4126
  REGION 1..268: note = TnsF-Tn7 System Protein

SEQ ID NO: 4129 - protein, 206 aa, synthetic construct
  REGION 1..206: note = TnsF-Tn7 System Protein
MNRSLSGVFPFRGQGVSYESGLERDFIRIWSLAPEVVAIIAQPVQIPFVGHNGNRYIHTPDFFVQFDDLLELKPLLVEVKPREAWTENWREWLPKWKAAWRYAQSQGWTFHIFDESRIRGVRLKNVEFLQRYRNMDLDPTRITAVLNSLDLMRHAPFHILLALHFHGHEAVGRSYLLHLLAVGKVWTDLDEEIDQFSILRCHDERY

SEQ ID NO: 4130 - protein, 631 aa, synthetic construct
  REGION 1..631: note = TnsF-Tn7 System Protein
MSVTDEGLVLNRGTLSIQVGEFVKHLKCVYRILVLVDFHHVLGQDVESGLSKMLPIAGLQKPEPDGGRLRSCGIDLQRIADKDWAVAERRYAVIAPLLAKDMHVQSAVLKRAEECGVSRATIYRWLYAYSEGSQFLSLLPHTPGWKKGNSRVVEGVEDIIGEVIQTLYLSTRRATIKDVSEEVEKRCKEKGFRTPSIPTITRRIRKIPRKKILRARGYSELASNTYDARPGKYSADYPLHRIQIDHSPADVIIVDDIHRNSIGRPWVTMAIDMYSRMVVGYYISLEAPSAVSVAMCLIQAMLPKHEWLNHHSVVGEWPVWGKPHEIHSDNGPDFKAKALIQSCTAHGIDRQFRPRKKPHWGGHIESLMEGNAKVFSKLAGATQRNPEDRGDVNSDKEATMSFDALEAWLIHTILIYNNKPHSGIEFKPPIKMWNEAFWGPKAICGMPPMPEDPLTLQIDFLPADYRTIHPYGVEWSAIYYAEALRPWISHVDPATGKKSKFLFRRDTRDINFIWFFDPGLERYFKIPLANHRFEGVSVAEYVATKRERKKHNLGSVDDEAIARSIEAQRQIEQAEAVRTKDARRQAQRKKNKSSGKTPATVLMGQPSAPKSTPAVDDAWGDDDVALYGGVA

SEQ ID NO: 4131 - protein, 669 aa, synthetic construct
  REGION 1..669: note = TnsF-Tn7 System Protein
MPALADAFLKNRADNLPPDVFQEFIVPPFFQHISIFKDSKSVRILGGRGCGKTMFLRFFCHGSTFSAHRENIGDEEFSNLGLYFRPDTGFCSLMTAEWLQKPKDGFAFSHYLTLSLVAEICQAIKNIDAAENLAGGSLNLSKARLGQTLVRQLELPEPTIEALQLLIEQRMADFDLWVRNPDQCELPRFVHFSTILTALANDLANHSPRLDALAFRVFVDEFENLLPRQQEIVCDAIKHPSQRFAVHIAHKRDAVTDLKTSREERIVELHDIRTIDLESNLVKDNDFEVLAAELFLFRIYQANGVVACPSFRPELLHDPVHLPYRLTEGYRQDVTNCVKQILPELNAPEIARLALADLPLRRRIAEMIKKGLEFQGLDGNTRAEDLINDEVPEASIVLGAILNRKTQSGKDALSLFKQLLESGRSRTDVFYKPGGWVDNNLYGCLFHLYAGLPRRPNILYSGFSRFCKIAAPNLRFFQELCHSTLLLAYQRKSADDIGGPLCVEHDYQAIAAKQVSDAMFEDIMQLGPHGYRLLDFARRLGGLFEAFNRRRSQSEPEINHFSINEADATRLAEPAKTILREAKIWSVLRETKDTKNKAEVDAAQFELVLNAIYAPHFKISYRKRRKITLTAAQLDIMLTQSDSQFESLVKQLVDSQDDEATAKITGSLF

SEQ ID NO: 4132 - protein, 669 aa, synthetic construct; identical to SEQ ID NO: 4131
  REGION 1..669: note = TnsF-Tn7 System Protein

SEQ ID NO: 4133 - protein, 292 aa, synthetic construct
  REGION 1..292: note = TnsF-Tn7 System Protein
MSNYSHLLPQFRSALELSDAERLASIKSRWIDYELSQDLFDRLYAKLCGHRDIPDFLILGESRMGKSSLINRFESLHGTSYVNEDGCRVRPIVSIEVSKPSLRMFYCEILRCSSSPFNPDATETKLRFQMEELLTSCHTKMLIIDEIQTIANGTSRQVADFMNEIKRLTNTLKLAIVGVGMPSAHRLLTLERQYAARFVTYELPVWGPSLAFRQLLKGFESWLPLKQPSSLTNKEIAALILKRSQGITGYVEEILFHSARKAIETGKEKIDLELLEKYKWAPDAFGMRKYAP

SEQ ID NO: 4134 - protein, 292 aa, synthetic construct; identical to SEQ ID NO: 4133
  REGION 1..292: note = TnsF-Tn7 System Protein

SEQ ID NO: 4135 - protein, 521 aa, synthetic construct
  REGION 1..521: note = TnsF-Tn7 System Protein
MTEHKPAGRPIRVGPTPPTTLEIMSAPARRGRPRTAGQLRCDRCGTMVAKIRVRWPDGAICGPCFTLGVRTRGACSNCGEDRLLPGRDPDGHPLCRDCAGISTNMTCKECGAEAERYGAGNCIRCVLRHDLTVLLKPNDPPDLRLRRLIEILATSARPESIHTWMRGNAANQILTMLGSRELTLEHASFDALPHSAAVEHLRDILTHHHMLPLQPDKSLANFERWLGERLTQLADRPTVQQPIEQFARWHHLKRLRSPKPGRNMITACLTARQEITEAGKFLTWLNDTHNITADQLRQQHVDEYLADGPSTKKHIRNFLHWLSRSQSRRRRVTTSYRKAITTPLITQDQRVELVANCLTFQQVALSTRVAALIFLLWAQPLNKISQLTSAAINTRPDGMRVTLGETESDVPTLIAGSIWNHISARGNQQTTNTGTNLLFPGYRAGQPIHPVTLAQRFHTLGIDTQRVRNTTLRDLTHQLDPRSLADLLGYSPRIIALHAARAATPMSDYITLKRENQRNLD

SEQ ID NO: 4136 - protein, 521 aa, synthetic construct; identical to SEQ ID NO: 4135
  REGION 1..521: note = TnsF-Tn7 System Protein

SEQ ID NO: 4137 - protein, 192 aa, synthetic construct
  REGION 1..192: note = TnsF-Tn7 System Protein
MRDAAAFKCLYGWGLRVDEARHIQVVDFSRNYSAPYFGDYGVLRIRWGKPHRGSAKKTRSVLTVWDWPAEALRIWIGHGLPLYGTPVTDVFPTTGGKVVDEPQLLKRLHALIDELGFPPGLDIHSFRRTYGTHLITGLGFDVSFVQLQFGHEHASTTTIYTLPAPDYQRLALKNAHDATLEAAQHLLNGRRP

SEQ ID NO: 4138 - protein, 112 aa, synthetic construct
  REGION 1..112: note = TnsF-Tn7 System Protein
MKRDITYHWHVRELMARNHYRSSKDLIEPLRERGITLSTVQVWRIIDQNPERIAFQVLVALADIFGVGVGELVTYTAADARTTRRKAAGSKDDVLNIRDYRPVRARIVPEND

SEQ ID NO: 4139 - protein, 491 aa, synthetic construct
  REGION 1..491: note = TnsF-Tn7 System Protein
MARPRKPDDPDLRRECPCARCGLGYPLVVTWGPDDQICGYCYQQAKRTRGTCECGHIGVLPGRVEGRPACRACAQITLNIDCVRCGAEDEIYRAGLCWPCALSETVDGLLTNPDTGTIAERLIPLAEALKSMKRANSGLTWIRQRHVTDFLNQLASLPELTHEAIDALPRSRTRDYVRGLLVEHGVLPRRDELLVRYQDWADTALERLTEDTHRAVIDRYIRWHHLRRMNQMDPVPHGTFLRSKQTVTVAINFLNWLGERDIALADVGQGEVDAWIAGGPTTRLLAERFLGWAMDTKNAPQGLTVPRHRRGNSTTLSATDQDAALDRIVDGDTLTARDKAAAILVLVFGQQIQDIAALNWDDITVTEGLATITLGSGPIVLPAPLDGPWRELHANPGHDQTAAHPRSNWVFRGHSPGMHIDPMHLRLRLRDHLVSARAARLGTLHELSKTAPAAIIADVLGYHPSTIERHAVDAAGTYAEYIASVREHGQR

SEQ ID NO: 4140 - protein, 491 aa, synthetic construct; identical to SEQ ID NO: 4139
  REGION 1..491: note = TnsF-Tn7 System Protein

SEQ ID NO: 4141 - protein, 349 aa, synthetic construct
  REGION 1..349: note = TnsF-Tn7 System Protein
MVEGWRAQMLARGLTRATIDGRCGVLRRFQEFAGTFPWSWRPVDLDDYMAGRRSGEKPVSWTTLRSDSNAIAMFCAYVSSSSYGWGALCQRVFDDVPAQIAFEWNTPRHTCEDAVPAGRRAFTATELQRLFDDVDDRVDREFAAGSKRWLPLLRDSIAFKVCYAFGLRRREVAMLDVQDFGPNPHVPAYGDFGAVTVRWAKGTTGSGPRRRTVLTVPEFDWVVDLLRFWITERGRRHFATADRSAALWPSERAERIRVGSLSDAFAAAREGAGLPKELGLHCLRHSYVTHLIEAGYDPAFVQTQVGHAYASVTGLYTSVGDDFKQKTIQRMIASRLDGRGRTQDGDADG

SEQ ID NO: 4142 - protein, 373 aa, synthetic construct
  REGION 1..373: note = TnsF-Tn7 System Protein
MDALLNHNPRRALLYSRESRTARTLLADLAAGTCEVSHEALDLRTHNHGDLAIDYFRAVLVSAGVLPLRDEYLARLERWIEKRTAAIEDPDDRRLITAFAQWDRIARIRRRARGKPISAATADIARTQIFKAITFLTWLKEQDETLATCRQPMIDLWLTSANHQGPYTARPFVTWAVRSRFASSIAIPARPRRIFQRPLDADERWTIARQLLNDDSFETKDRVAGLMVLLYGQNLARVCRLTTAHVIHDDQGVALQLNKIPLRLPPPLDGLVLQLSEIARSHEPMVMSNELNAPWLFPTQRPGKPLTSRQLANRLRNIGLPSEAGRCAALLDLCAQMPPAVVQRLLGVSSFAAERWAAGAVRAAYAAEIARRT

SEQ ID NO: 4143 - protein, 710 aa, synthetic construct
  REGION 1..710: note = TnsF-Tn7 System Protein
MTTPRSVALERLAYTLAAPVLAVAPNLYPDHPVNQVVQLAGAAGIGGWFLAAKSDAHGAGRKILRWSPLVLAAAIDIAAKNTTGFGPYGLDGLLAAGWAAAGYLVMPFSRHTRRRHRPALAAPVAQPAPAEVIEEPVVQDDGADLLTRDARMLWEQAGMPGRTHIVKATRHPGQQNDMTILLRASETGRPITGLTEAAVAAPFAVHSSDVVLAEVAIQPGRQGGPGWMEAHLTPDANQRRRAKPTDQERWTDKVGSPKGGAPGSELVHKLRDDVRGVTFYRARMADATTSPRIDLAKVCRGLKLPEDDSCVFVLIDGIEFLISAFDKPPLSAIFPATRELLTPDAKGMYVCGYTITGQPVKNMVFQHDKNAARHGLILGVSRSGKTQFFAIDMAAMSLAGQVVWLSTVRKDEKTSTLGRYIDRQGSNALWMARSLRAAKALCEIRAEMPWAYDGQPHDYKPGDARCPYRQLNVFADEFMTAAQDATFGEFIQADGDDLTVTGLKYGIGFNPAGQSPFTHNGFSTEMKDNLRQNSRPSIFNMGSPGATRKAAEGTMENAYDVPTIPARYAQQEGSAIERAMRGEADPENGVSTGGVAIMVLDDGRAVLMRSLYADFDTDLAHLFPDEVNRLTDHEIAELEKRGLWFDWNEPVRPGEFWPEPDEDDDGEGRSRRRGGGGGKGGRSSKGGGRRSEQVASPRQALEAIKSLTDA

SEQ ID NO: 4144 - protein, 385 aa, synthetic construct
  REGION 1..385: note = TnsF-Tn7 System Protein
MGDKRMEIKEALLNAPPKTVIGMFRRKKAINVLRALVRSEAGIRHQTLSELGSYIEVRDVRSFLVEHKILPVRDEHLAHLESWIESSVVRIPDPKQRMMYLQFARWRHLRPLRVQTAPVTLGQSNGPRNELNQVIQFLSWLNHSETTLAALGQEQVDNWTSNGPNSRTAIRHFLDWSRRNRLVNRKIVIHPPKSTVLTVVGMADAERWRLLDLVLDPSSTISGPDRLAASLVLLYGIRLKRITELKLSDITVDEGKACIHLGPDPLDLPEELLNAVEDTILNRSARRILGNAVDSEWLFPGAGAGQHLSTDALEVRLSKLGIRQTQARRSALTPLALQLPPPVLARLTGIHISTAYSWSVAVSASNARYGASRHNDSKDSDRNWL

SEQ ID NO: 4145 - protein, 385 aa, synthetic construct; identical to SEQ ID NO: 4144
  REGION 1..385: note = TnsF-Tn7 System Protein

SEQ ID NO: 4146 - protein, 544 aa, synthetic construct
  REGION 1..544: note = TnsF-Tn7 System Protein
MTFPNELIFPNGSTPIVFRPGLSTIVVGANGSGKTRLAMNCEEQLGAAAHRVSAQRMLSIDPSIEKITEKSARDQLRYGAAVPSQYGGWAPARENARWGGRNPRFILDDAGSLIQVLFGEQANTAVTAYNAAADGVPVASGETLMRRLRAIFQRVLPNRDLVITADNISVVPLADDGATGAPYSATELSDGEKAVMYMIGQVLVADPASVLIMDEPEIHIHRSILGRLWDELESARPDCAFLLITHDLEFAASRAGKKYVVRSYSPSGGWVIDDVPEADGFSEDLVTLILGSRKPILFVEGEHGSLDVAFYRACYPGWTVVPRGSCEAVIHSVVTMRRNAELTRVQCSGLVDADSHNEQDREGLASNGIRTLPVSEIENLLLLPTISRAILKMDHLDDQETAITLAALQAAILADASNPSHVEEVVLRHCRRRIDRMLKQVDLSADKTVAGLAANYATRTSRIDVSALASEIESKISASVDAADLPALLAVWDRKKSLLALAASHLRHTKVDVFSAWTTRAIQSKEDTRLRDAVHAVLPVIVAV

SEQ ID NO: 4147 - protein, 544 aa, synthetic construct; identical to SEQ ID NO: 4146
  REGION 1..544: note = TnsF-Tn7 System Protein

SEQ ID NO: 4148 - protein, 511 aa, synthetic construct
  REGION 1..511: note = TnsF-Tn7 System Protein
MGIARTHAVALLGLTGALIEVEADISAQLPGMILIGLPDAALAQATQRVRAAATNSGCPLTVHRLTINLSPAALPKHGAGFDLAIALACLAADSTVSAKSVGQVVHFGELALDGRLRPTLGILPGVMTAARLGHTTVMVPIGNEAEARLVPNIHVIGVASLRDAAIFHGATLPPIPVEPILAATVPASLAAEPDLADVIGNDDAILALQIAAAGGHHVFLLGPPGAGKTMLAARLPGLLPDLDPASSLEVSSLRSLSGLGLGGALITRPPWEAPHHTATAAAMVGGGNGQIRPGAASQASHGVLFLDEAPEFASPVLDALRQPLESGWISIHRANAVAHFPARFQLVMAANPCPCGQYGAGDLSCTCPPNTRRRYLARISGPLLDRIDIQLNVKRITAAQLRVATGTQRMTSVTARKRVVAARAAAAERLGSTPWTLNSQVPGPWLRGASTRLAASTTAGLDRALERGGITMRGYDRVLRVAWTLADYDGLTIPGPDQIGHALYLRKGMTS

SEQ ID NO: 4149 - protein, 511 aa, synthetic construct; identical to SEQ ID NO: 4148
  REGION 1..511: note = TnsF-Tn7 System Protein

SEQ ID NO: 4150 - protein, 288 aa, synthetic construct
  REGION 1..288: note = TnsF-Tn7 System Protein
MHLVSVRRLAPSTIRAYQTSIRAFCDYICSEHYDWVSQCEQRFGTHPVQVCHEWNTVRHLVDYEGRPGRRPLTRKEIQNLLDHVDAEVGTRLDEQKKGALQVYRDATIFKVIYGWGLRADEVAKLEVTDFYRNPEAPEFGSFGMLQVRNGKGSKGSGKKRRSVVTLRLEAVTALRDYIDNVLPLVRVANSNTLWYSERGTQMTARHVADRFGDYRDELGLESALTPHCLRHSYATHLTEEGYDHRFIQEQMGHTWGSTTGIYTHVSANFANTMVRDALSRQRQAREIR

SEQ ID NO: 4151 - protein, 118 aa, synthetic construct
  REGION 1..118: note = TnsF-Tn7 System Protein
MRLVGYEWRLREVMATQGIFSTTKLIPLLHDRGIDLSSSQVYRLAADKPERLNLHVLVALMDILDCTSDDLIKRVELGASAVAATGTDSSGGTDSASTALKRGGIRPVRMEVHFPTDA

SEQ ID NO: 4152 - protein, 374 aa, synthetic construct
  REGION 1..374: note = TnsF-Tn7 System Protein
MITVLTGMRRPNSGVTWIRTNPKIVTLLRALGDGTLLLNHAALDALPQSQTVEYIRELLVAHGILPFRDRYVAGYERWLAIKLASIESTEQRKIVEQFGRWHHLRRLRAQAARAPVTQNAFLHAKQSTAITTAFLRWLHERVLHVHACTQHDVDAWLSAGPSTRQKADDFLGWAVRQRLIKGITIPGRHYLGHPHIGEDHRVDLLRMLLLHETMPADHRIAGYLILLFGQPVQRIARMRIEHVKVIGELVELRPGRVWIPVPEPFATLLRTYLGDRPHMNTAANPNSPWLFPGGMLGQPITPQMITDRLKREGIPPLAARSGTWLQLIREAPPAVLTQALGIHPITAMRYAKLAGADFLSYPRPRVSSSIDVDG

SEQ ID NO: 4153 - protein, 374 aa, synthetic construct; identical to SEQ ID NO: 4152
  REGION 1..374: note = TnsF-Tn7 System Protein

SEQ ID NO: 4154 - protein, 325 aa, synthetic construct
  REGION 1..325: note = TnsF-Tn7 System Protein
MLVHSGALTERNEYLERITPWLDRLLEHEPAHHVRLIRPFAHWHVLLRARRKARRRSITYGSSEFVKSRIRIALHFLTWLDEQERSLDTLRQEDIDRWLISGPRQRYAIRCFLDWAVRRRIVGSIAVPAPRDGHPVQFIDEDRYTELLRRCLNDVDLPVDVRVAGALVLLFGVTVQRVLQLRLEDLNRGNDSIDLMLGDKPVRLPPRLAQLVLELADSPRDRSAVGRAVGTTQFLFPGRVPGRPAHAAAFANKLNRHDIKITAARNTARITLALDLPAAVLADLFDMHINTAVRWVHRAKRDWSSYIAARAEDLNHQGIPQRWNK

SEQ ID NO: 4155 - protein, 367 aa, synthetic construct
  REGION 1..367: note = TnsF-Tn7 System Protein
MPGAAHLVLADGVVHLAPESATFEAMLEGWARQQRTRFLDWKGTIHPRLLLVRRFADFTNEYPWQWKPCEVEAFIDHLRGRRQNFAVSTARGYQNILRLFCEYITDARYGWPLKCLEYFGEAPAQILHEWNTVTHSSEYEGSPDRRPLTYDEVQSLFDAADGRVEEIRARGRKGALAAMRDSAILKTVYAYGLRRQEAARLDLPDLRRNSKLPDYGRFGALFVRYGKASKGGPPKRRTVLTVPEFDWGVDVLGHYLEEVRPRFSPGNHPALWVTERRGRISLRRLDEAFETARKIAGISEELDLHSLRHSYVTHLLEFDYPERFVQDQVGHEYASTTAIYSGVSDEYRNRLVQRSLKKRHADLWEMQ

SEQ ID NO: 4156 - protein, 113 aa, synthetic construct
  REGION 1..113: note = TnsF-Tn7 System Protein
MGDAIVIKKMGTRWNLRKLMATRDMFQTTDLVPLLAERGIHLSREQVFRLVTQSPQRLSMDTLAALCDILACTPNDLIEVEVVNTEVRKTVGGEAGPAPAPIRRTTIRRPGDS

SEQ ID NO: 4157 - protein, 379 aa, synthetic construct
  REGION 1..379: note = TnsF-Tn7 System Protein
MRLKRLIAELAAVPRPESIITWMRHPVTAALLTKIGTRELHLSHDAFDALPASRSLEHLREMLVHHHMMPERGDPRLARFETWLARRLETLQPTPAIHTPIEQFARWHHLRRLRENTDPTRNMDNATRGAKQEITEAGKFLRWLLDEHHTTINDLQQAHLDAYLSEGTTTRSTIRNFIQWRTRAGIAPPFKTGYRLARTTPLTSSRQRLELIKAVAEAEHTALSIRIAGLILLLYGTPVSRISELTLDDVDTTPTRTTIKVGDLPAPVPEALLPLFHRHLADRGNHRTMNHRSRWLFPGTRAGQHISEQVLMKSLRSCLKIDIKAARNGVLHDLTKEIDPVSLADLLGYSTQVMNIHAARAAVPMATYPAINTPRALRD

SEQ ID NO: 4158 - protein, 379 aa, synthetic construct; identical to SEQ ID NO: 4157
  REGION 1..379: note = TnsF-Tn7 System Protein

SEQ ID NO: 4159 - protein, 368 aa, synthetic construct
  REGION 1..368: note = TnsF-Tn7 System Protein
MGQLVYLPAGAAGPDPDAFLSDVLTGWRRAQLAQNFSPGTARRRATSVLRMGDFVGSYPWQWTATDADDFFGHLRGVRNLAHSTVRAYQTDVKLFLDYATDPAYDWNEHCGRLFGTVFSQVITEFNKARHVQADDARPLKRPFTPTELQQFFDLADLEPERILYAGRKGALAAWRDAVAFKTLYGWGLRRNEARHLQLVDFSRNARAPFFGEWGLVRVRYGKAMRGSPAKQRTVLTVFDWAAEALADWAERGLPRYGRPINDLFPTEKGGLVPERNLWQRMRSFVDELGFPAGLDLHSFRRAYATNLQVEYGYDVSFVQLQLGHEHASTTSIYTLAAPDYRARELERVLSATLARSNARLGGPTPKES

SEQ ID NO: 4160 - protein, 111 aa, synthetic construct
  REGION 1..111: note = TnsF-Tn7 System Protein
MRREIQYHWRIREFMARAGMKNSRDLVGPLRERGITLSESQIYRIVGQEPERIAFKVLVALCDIFGIEAGDLITYTATDARQSRSKVANAAADVPLLNAYRPVKARIVTDD

SEQ ID NO: 4161 - protein, 263 aa, synthetic construct; identical to SEQ ID NO: 2669
  REGION 1..263: note = TnsF-Tn7 System Protein

SEQ ID NO: 4162 - protein, 374 aa, synthetic construct; identical to SEQ ID NO: 2667
  REGION 1..374: note = TnsF-Tn7 System Protein

SEQ ID NO: 4163 - protein, 374 aa, synthetic construct; identical to SEQ ID NO: 2667
  REGION 1..374: note = TnsF-Tn7 System Protein

SEQ ID NO: 4164 - protein, 263 aa, synthetic construct; identical to SEQ ID NO: 2669
  REGION 1..263: note = TnsF-Tn7 System Protein

SEQ ID NO: 4165 - protein, 263 aa, synthetic construct; identical to SEQ ID NO: 2669
  REGION 1..263: note = TnsF-Tn7 System Protein

SEQ ID NO: 4166 - protein, 91 aa, synthetic construct; identical to SEQ ID NO: 2671
  REGION 1..91: note = TnsF-Tn7 System Protein

SEQ ID NO: 4167 - protein, 91 aa, synthetic construct; identical to SEQ ID NO: 2671
  REGION 1..91: note = TnsF-Tn7 System Protein

SEQ ID NO: 4168 - protein, 486 aa, synthetic construct
  REGION 1..486: note = TnsF-Tn7 System Protein
MARPKPLPDPTKYTPCQRCNQAYQTVAWWQGQPICNYCYLAGKRTTGRCIRCRHVGICPGRTPTGELLCRKCSGIRLNVDCVQCGDEAELYRAGHCWRCELAAQVDQLLTHPATGTINVQLEPLASAIKSMSRPNSGVTWLHNQRVRTILLQLAQSSTIDQSLLDSLPTSRHTTHIRALLAEHGVTEAKVDYRDRFDTWSLDKIADVNDPASQRVLRSYLRWHLAHKLDDACSEGRFLASKQAVTVAVHFLNWLAVQTIPFAEVSQTDVDRYIAEGPETRRLLTRFLPWAVKSCRLTKLEITPHRRDTTQEKTTDEQIEQLQNLFAHPDMTAQDRLMAALILVFGQPTHKVVALQWKDITIHDAAQAITLGRHPVILECPLDELVVAVSQSVANRQTAANAITAWVFPGYRPGSHLNANHARVRLKKLGFPSLSTRIGTWQSITQTTPPPVLADALGLNPQTAIRHARRGSGQYGAYVADRTHADL

SEQ ID NO: 4169 - protein, 486 aa, synthetic construct; identical to SEQ ID NO: 4168
  REGION 1..486: note = TnsF-Tn7 System Protein

SEQ ID NO: 4170 - protein, 385 aa, synthetic construct
  REGION 1..385: note = TnsF-Tn7 System Protein
MADREPLPGAAPLRLLRGDTRLLRADEQVWLEMLEGWRASLLARNSAVSTIRNYVRVLTDFQTVCNDYPWHWSPTDVGDYVTVLHARAHERRGTAAAKSTVRGYLMVIRSFCSFLCEPRYGWADLCHRLFGEYPAQVCFEYNLPVHVSENEADPQRRAFSRDEVQRLFDYFDNRVDDLYAANKKAWLTTLRDACIAKVAYAYGVRRQELLWLQIHDFGPNPHVPQYGAFGAMYVRWGKGSRGSQAKRRTVLTVPLMSWGPEILNAWINDPDCRQRMTFGAASPWLWPSERGTQLTLDSYATRFTDHRRAAGLPNGLSLHGFRRSYVTHLIEAGYDPLFVQQQVGHEQSSTTALYTQVSSDYRQKTLQRMISQRLESADISYGKTP

SEQ ID NO: 4171 - protein, 394 aa, synthetic construct
  REGION 1..394: note = TnsF-Tn7 System Protein
MADLVAGPTPATATGWEPLIEMLVGAPHPKTQLRWLRHSEAARIVRRFAESGIPPSHDVLDEAAGARGGAAGAIEHLRSLLVTTGAIPARDNRIARLESGIKRKRAGAHREDRRVLEQYARWHVLARARRNAETAGLSHGRRNSAMHQVGAVADFLAWLRRMDSALDDCTQFLLDRYFVDFPAQRRELLRFLRWARRHRHLPDNISVPSDRYRAPRARFTPGEREHLLRRALTDKGWPPRERAAACLILLYGLSPAQIVTLTHDQVHHEGRLIRLSLGRAPIDLPPGVADLVRGLPEGHRDGAHAGAFASLETWLFPGDRVGAHLDPTSLSRMMRRRGISPRRARNTTLSDLAAEVPVPVLVRLLGVNAVTAEQWRDTRGHAPGYVRDRLDLGG

SEQ ID NO: 4172 - protein, 394 aa, synthetic construct; identical to SEQ ID NO: 4171
  REGION 1..394: note = TnsF-Tn7 System Protein

SEQ ID NO: 4173 - protein, 388 aa, synthetic construct
  REGION 1..388: note = TnsF-Tn7 System Protein
MGERERNPGSAWDLLRDEVVHLDPQDAVWTAMRRGWEIQQQSRMLSRTTIDSRLKAVDRFFEFAGTYPWQWQPSDVEEWTAVLRSHKRAFSTVRAYQGAVAMFCDYLVDPRYGWGDACFEQFGEHPVQVFHEWNIARHTSEFEANPAVRPFTRTELQRLFDFADEQVERAVASGRKGSLAAFRDAVMLKTCYAYGLRRAELVGLALSDFYTNAASPEFGAWGSCLVRYGKAAKGSPPRRRTVLTVMPWIVEVLEEYVTRVRPLYEVGQRTMMFPTERGGKVSASYLEARFRQYREAAGLPAELRLHGLRHSYITHLIEDGWDAYFVQRQAGHAWASTTSIYAGVSSDFMNTTLRAALDRSAPGLLESASIVDGDAGESTEGKDMECES

SEQ ID NO: 4174 - protein, 108 aa, synthetic construct
  REGION 1..108: note = TnsF-Tn7 System Protein
MRVVKYHWNLRQLMADRGLYATTDLLPLLADRGIELSASQAFRLVTGTPERLSLPIMAALCDALACEPSELFEPYAVAAKARTRRAAGETKSSPADLKRPTPARIVKE

SEQ ID NO: 4175 - protein, 435 aa, synthetic construct
  REGION 1..435: note = TnsF-Tn7 System Protein
MLAFYDGDRRPSCATCTGNEAVYACTDCGREDSPWGRLCGHCALKEKATALLSGPDGGIHPQLRPVHEALVCGPRPQTTLYWFTRSTGPSVLAAMARGDIEISHATFEAMPADKTHNYLRDLLAALGVLPPFHAELERVTPWLNQLLSTLPDEHAEVLNRFARWQVLRRLRREEQRGTLTHGAISAARATIVVTARFLGWLTEHRMDLADLTQDDLDRYAEQHRARVTALRPFLTWCEATDLGRELSPPKRPDLQPAVTLPDEDRWRHVQLLLHDDTIRLYTRIAGLFVLLYAQPLARVCRMRVDQITVTAAGITRATFDTYPIELPDPLDHLVRTHLTRRGQASYASRPDTWLFPGGIPGKHLVTENIRSQLVARGIQPLAARNAAMFQLASTMPTPILAEILGLSPTTATRWAALAARDWSTYTALRDRALQQ

SEQ ID NO: 4176 - protein, 435 aa, synthetic construct; identical to SEQ ID NO: 4175
  REGION 1..435: note = TnsF-Tn7 System Protein

SEQ ID NO: 4177 - protein, 371 aa, synthetic construct
  REGION 1..371: note = TnsF-Tn7 System Protein
MVDVPGSAGLLLVAGIAHLNEESAVFEAMLTGWGRQQQSRLLGSKTVTDRARLVRRFTEFADSYPWAWGPGDVEDFTVSLASGPGARAPSTIRGYHLALRMFCDYVTDARYGWLKECRDRFAAVPSQVCHEWNTVAHLNEYEGRPARRPLTYGELQDLFDHLDGQVERAASSGRKGALSALRDAQIFKTAYAFGLRRNELCRLDVADLRPNPHVPRWGTYGSVHVRYGKAVRGGVPRRRTVLAVPEFDWAIEGMRQWVEQARPLFKAPGQPALWVTERLSRVSLRHLDARFADVREQVGLDPALSLHCLRHSYVTHLIEFGYPERFVQEQVGHAYASTTAIYASVSNDFKDKTLKAALARVYAPTDQEDPS

SEQ ID NO: 4178 - protein, 111 aa, synthetic construct
  REGION 1..111: note = TnsF-Tn7 System Protein
MTVRTAMGWHLRQVMATHGMYQTSDLVPLLAERGVHLSREHVYRLVARTPQRLNMEVLAALCDILDCEPNDLLVPTVVEDQTTKTGTGDSGPGIGDLRPIRARVRRPPEDG

SEQ ID NO: 4179 - protein, 333 aa, synthetic construct
  REGION 1..333: note = TnsF-Tn7 System Protein
MHQSHTFPRDRSREYLRDLLIATGVLAPDARELRGLLAWLEDFLAQQPSSYRHTLQTYSRWNILRRARAQADKGQLTDNTVGNIRNHLRMLGEFLTWLNEHETALDRARQAHIDDFISTHPDATRHLPQFLRWTHSTGRSRLLTSPTYRSQQTSPQRAGSEHWRTVERLLHDESIRADTRICALFVLLYGQRVANISRMTRDAVTVTAENVTVRFAAEPIVLPPGVDTLLRAHLQALSNNHEQRNGPWLFPGRNPARPIDHGGLEVRLKRVGVAPLAARTTAMMQLAAELPAAVLAGFLGIHPQTAVVWNTIAASSWNSYPALRRSQNSRTDV

SEQ ID NO: 4180 - protein, 635 aa, synthetic construct
  REGION 1..635: note = TnsF-Tn7 System Protein
MGMREMQQRVFEQRDAQYLLVKAPPASGKSRALMFVALDKLYNQGRRKVIVAVPEKSIGASFASTDLTKHGFWANWEIKDEHNLCLPGSDAGKVDAFIEFLRGPDAVLVCTHATLRFAFEKLAPESFNGTVLAIDEFHHVSADTESSRLGALLRDVMNGSDVHIVAMTGSYFRGDSVPVLSPEDEAKFTPVTFNYYDQLNGYEHLRSLGIGHHFYQGRYTDAIDQVLDLDKKTIVHIPSVNSGESTKDKIEEVGRIIDAIGHVESTDPDTGIISVRREDNGEIVRVADLVDDTDQKKRGDTLHYLSHTASKERDGVDIIIALGMAKEGFDWPFAEHALTVGYRASLTEVIQIIGRVTRDSPGKSHAQFTNLIAEPDASQGEVKVSVNNMLKAITASLLMEQVLAPNFNFKTKKFDDDEFVKKGELKIKGFKEPSSDRVKQIVATDLNDLKATILQDDTFARAAAGSIDAETTNKVLIPKIIREKYPDLTEEQVEEVRQQVVVDSVIKNGEVKTVGDRRIIKMAERFVNIDELNINLIDSVNPFQRAFEVLSKSVTPSVLRLIQDTITSTKIEFSEEEALALYPKIKTWVQVNGKRPDVRSEDPVEKRMAAALLFLQKLKQQRRADKAATEMVEPS

SEQ ID NO: 4181 - protein, 635 aa, synthetic construct; identical to SEQ ID NO: 4180
  REGION 1..635: note = TnsF-Tn7 System Protein

SEQ ID NO: 4182 - protein, 250 aa, synthetic construct
  REGION 1..250: note = TnsF-Tn7 System Protein
MLSAKQSTSAAIGFLQHLRDQGRSPATCTQADVDDWLADGPTTRSLARTFVRWASAHHHLPPLDFPYRLARTEPIITQQQRLEHISRLLDPDTDLTADERAASLLLLLYGQPLTRIAGMRLQQLNLSGQAVTILITNDKLTIPAPFDEIFRQHVAELPHQTTSVHTDNEWLFPGRRPGMHLHQNSLMGKLRRAGIDLRGARNAALRALVLELPAPVIADALDYSYQVTDKHRRNAGTTFIDYVARRPTPL

SEQ ID NO: 4183 - protein, 346 aa, synthetic construct
  REGION 1..346: note = TnsF-Tn7 System Protein
MLDGWAAQQSARNLSSSTIDKRRSIAIRFRAFADSYPWSWSATVVDEFFLELRALKGASHSTVLGYQNALRMFLEYLVDPAYGWGEQCWARFGDHPAQVFHEWNTARHSQEASGQPGKRPYTRDELQDLFDCADDRVLRIRRSGSKGWIPAFRIATIMKAAYAWGLRRNEVRQLDLVDLASNPRARHFGEVGIVYVRFGKAMRGSPPKRRAVLTLPEFGWIVECMRQWTDDVRPLLAPPGSTALWPSERSSMLTADSLSRAFAEVRHEAGLHDDLDFHSLRRSYVTHLVEDGYDAFFIQQQVGHEHASTTSIYTGLSPDYRARVVDDAITRMAAQLTTAQPKPEES

SEQ ID NO: 4184 - protein, 108 aa, synthetic construct
  REGION 1..108: note = TnsF-Tn7 System Protein
MQRRIEHGWRLRELMAARGMNTISDLIPHLSDRGIHLSASQIYRLVGGTPERMNLALLGAILDTLDCTFEELCPVTVEAVTDRATGTAGAQTKTDAFRPARARIHRPE

SEQ ID NO: 4185 - protein, 429 aa, synthetic construct
  REGION 1..429: note = TnsF-Tn7 System Protein
MLAFHDSDGIIVCASCAGVPARFACKRCGTEEQLTGSHCGTCRLTERARTLLSRPDHTLHPGLDSFLQHLLTVPDKRTATRWLRHPEISNTLQAMAHDLQDISHDTLDKLTPSPRIRYFRRILMNAGTLPVIDIELHDFTLHVEKVLSALPPAQALIIEQYYRWEILRALYRQAAQRPLRPSESYRRRQEIVVIQDFLTHLHEHGTTLQDVTQTDVDRYLGQASTTGNRLGGFVAWARRAGIAPALATPRKGPLTPRAAMSEAQRWAHVDRLLGDTALDTTVRLVGLFVLVFAQSLTSCARLKLADVTLTASATTIRFAAAPVKLPPSIAQILRCHLEQPAVRAIYRPAADVWLFDGLMPNTHITESNLGRMLKDIGIAPRPAKEAAARQLSSTMPARIVADTIGISLNTASRWAQESGATWRHYPHLR

SEQ ID NO: 4186 - protein, 429 aa, synthetic construct; identical to SEQ ID NO: 4185
  REGION 1..429: note = TnsF-Tn7 System Protein

SEQ ID NO: 4187 - protein, 197 aa, synthetic construct
  REGION 1..197: note = TnsF-Tn7 System Protein
MKVALVNLKGGVAKTTSSIYIAAALAQKGTVVLLDGDPKGSASDWTGLVEDSGEPMPFTVKVVNQRTMKKAAQGFDYGVIDTPPGNPQVIDAAIATADIVVIPTDASAMDIQRVWPSIEAAARAGKPAAVLIVRARLNTRSLAIAVETFEQAGAAVIDAYIPLREDIKNAYGTIPTNLHGYDQVATDLLEVHHGIAS

SEQ ID NO: 4188 - protein, 197 aa, synthetic construct; identical to SEQ ID NO: 4187
  REGION 1..197: note = TnsF-Tn7 System Protein

SEQ ID NO: 4189 - protein, 349 aa, synthetic construct
  REGION 1..349: note = TnsF-Tn7 System Protein
MFDAMLQGWRNQQLSRGLNRQSIDTRIGLIRRFTLFCERSPWEWTPTDLEDFTVHLTSRGKPLARSTVRSYHGVVRAFCAYLTDGRYEWMGECEARFGSAPQQICHDWNTTVHLLEYEGRAQRRALTFEELEAFFSCADQRVDSIVSTGKKGGLAALRDAQIFKTVYAFGLRRAEVLGLDTADLRPNPAAPRFGSFGAVQVRWGKGSRGSGPKRRTVLTVPEFDWAIEGLQQWVEQGHNRFASTKPTSGGRALWPTERGTRVSDRYLAQRFAEIRDEAGLPPELSLHCLRHTYVTNLIEWGYSEKFVQDQVGHLYASTTAIYTSVGDDYKNRVIAQALSRIYGSSNASS

SEQ ID NO: 4190 - protein, 116 aa, synthetic construct
  REGION 1..116: note = TnsF-Tn7 System Protein
MPLHEPQQPFTWHLREHMAAAGMFKTTDLVEPLREAGVHLSREQVYRLVTSPPARLNMEVLAALCQILHCTPNDLIHVNTARSGLHETRRTGTSNSGASVGELRPIPARLRRPPSE

SEQ ID NO: 4191 - protein, 167 aa, synthetic construct
  REGION 1..167: note = TnsF-Tn7 System Protein
MRIYRRFFNGEGYCDACYYREFKHKPCVKCGQIYRLPYRQKDVVCDRCKKNRPCLRCGKEQYSIGKLTQYGPVCNACSVYFREKKICSVCGKKAFRATRLGKSGTGAWLCPSCYGKARGHASCPQCGRHRMLQETEHGAMCKKMCYRGVYKLHNLPCPNTRRERKKM

SEQ ID NO: 4192 - protein, 285 aa, synthetic construct
  REGION 1..285: note = TnsF-Tn7 System Protein
MNLLKVSVRKGAVRDAFPAFALWLAQDVGNDKAAMTIERYAPFFRVAAQQWPSLPDFPTILSHFKPKGMRRYLKVKQWLEQLPNQKTDKQLALDLAEQDRIEVLRGKLAGNAVAESLFESYYDKLLAKHHAGKTSVRSVRLAVQPVVGLMQGLSRFPVQADIDAYLRKKAGQRAALTGFISHLRREYALDLQVGKATEKGRERMKVAKRNALEKRVIAYVVRCYKHPDAFRLYDWLRLALPYFHWREICREYTVTERPDGYMVSQAGEEMFVPALKGEFSFMKKD

SEQ ID NO: 4193 - protein, 193 aa, synthetic construct
  REGION 1..193: note = TnsF-Tn7 System Protein
MYPFRRQYSLAYESSLERDFIILQEFDCSVVKVVAQPIKIPFLLKGRNYQYTPDFLVLFEQGCPKQGMLVEVKPESEWRSHWRSWLPKWKAAYRWAVERDFLFRIYDESRIRGQRLANIKTLSRFLDKQPDDALTGLIADFVGDGMVSMGNILSHFSTFPACGSEVYRMLANRGLFCDLDDPLSADTLIWRKK

SEQ ID NO: 4194 - protein, 637 aa, synthetic construct
  REGION 1..637: note = TnsF-Tn7 System Protein
MEKEMTDSDKQKKAASRGKLSLSVNEYVRHIPTDRQYRISKLIDHTYILAADENGQEKVLKIEELGLPKTNIAPYAGDLDQLEDEIWEEAKYRYELIQPLLKDEITGRTAIEAYAKEKGVGYSSLYRWLRAYKANNSISSLISRQRGWLEGASRLDKETEKIIQEAIQKYYLSEQRLSPIKVIQQIRVLCHQRGIKPPADNSIRKRMNELSEKEVLRRRGYKEKAKNKFQPKPGHFPDVSYPLDVIQIDHTPMDIILVDDKTRQAIGRPWLTVAIDVYSRMICGYYLSLDAPSEISVAMCIAHCVLPKEEWLSAKGVNGEWKVWGLPKKIHVDNGMDFRTETLKRACLEYGITLEYRPVRVPNYGGHIERLIGTLMRESHQLAGTTFSNVKEKDNYKSVDKASFTFDELEEWLLNLIVNVYHKRIHRGIEMRPEDKWDLGIFGNGREYIGCGLPNIPVDKERLMLDFMPFTHRTIQANGVTWDGVRYFDFCLAPFIGKSENGKSCEYLFRRDPRNVAVIYFFNPNSESYVGIPAADQKFPRTSVWQLRETKKRLRELGRKNYNEHQLIEAIQQMSRLEESAKKETLKARRKRQRNVLHDRQITPIQPDVSRNPPPVAEITVPDLAVQAEIKPFEDIE

SEQ ID NO: 4195 - protein, 199 aa, synthetic construct
  REGION 1..199: note = TnsF-Tn7 System Protein
MFLDEMPEFDRKVLEALREPLESGEIHISRAARQAVFPAKFQLVAAMNPCPCGYLGHPVKPCRCTPESIQRYRNKISGPLLDRIDLVIEVPALPAADLVQAEAGESSATVRQRVIFAREKQYARQGKLNAHLSPTDLDGIAAVSPEAKSTLGNLLEKLSLSARSFHRILRVARTLADLAGDDTVNEHHVLRAVAFRRSL

SEQ ID NO: 4196 - protein, 351 aa, synthetic construct
  REGION 1..351: note = TnsF-Tn7 System Protein
MKMRTPQIIPEESLSSWMVRISLLNACDMWTLSWKVWGQGRLLTSDFERNLPAERIHQLSEASGRPYAEVDALLLIHPVRQHTAALNTAGKIWPWMVPIGIRHRRRSVGQPFCPQCFQEGIPHLRREWRMAWATACNKHRILLQDCCPECGFLYSPTKLSGFEGTMAFCHHCGHDMRKNPVELAFSAIQRAVEENKLCCFGQKFDMPTWLLTLDNVVCLTRRATLAPAGYVSAMLQDLELLQLPEPSETGGTFELLPIRERHALLEAAACVIKQPMSNLIQAAQKNRVTKSTLRNVLHRDRSPVFIELYDQLPVSERSSISNIEYNSPRSEKAVMKKWARLERKIQRVIAS

SEQ ID NO: 4197 - protein, 167 aa, synthetic construct; identical to SEQ ID NO: 4191
  REGION 1..167: note = TnsF-Tn7 System Protein

SEQ ID NO: 4198 - protein, 293 aa, synthetic construct
  REGION 1..293: note = TnsF-Tn7 System Protein
MERYSHIHPKFRHCLSLSDEERITFIRESRWIGYSQAREILQLLEEMLNYPKKPRMPNILLIGESNNGKTTLIHHFYKKYGEAYEDEDLNLIKPILMIESPATASEKALYMAILNELMAVYRDTATVETFYTQTLHLMRTFGVKMLIIDEFHSMFSGTARKQRDMMNTLKRLCNELQIPIIGVGTENAVNILHTDKQFASRFEVWELPAWELNENFLRLMMSFESVLPLKEASNLASPDMARAIFYKSKGNLGNVSRLLERCAVEAIRTKAEKIDLKAIERQKNFMSTVRGLV

SEQ ID NO: 4199 - protein, 293 aa, synthetic construct; identical to SEQ ID NO: 4198
  REGION 1..293: note = TnsF-Tn7 System Protein

SEQ ID NO: 4200 - protein, 238 aa, synthetic construct
  REGION 1..238: note = TnsF-Tn7 System Protein
MGQADFDVWLVTHPTLRKPLTPFIRWAKVGRLNTALVLPSAPRQFAGTFLDEDQYTQQLRRCLVDATLPREARIIGALVLLYALPLTRITELTTDRFHRDDKGAYLTLGGRNPALLPPSLAQLIENQITDPNTGKFRGELDDGTRYLLPGQAPGRSRNPLGVGELMRLHALPTRPARNTAMIEAVTDLPPIVVADLFGLHPDTATRWAGYASDSWTHYLAAREKRGRAATGLATDRCR

SEQ ID NO: 4201 - protein, 238 aa, synthetic construct; identical to SEQ ID NO: 4200
  REGION 1..238: note = TnsF-Tn7 System Protein

SEQ ID NO: 4202 - protein, 291 aa, synthetic construct
  REGION 1..291: note = TnsF-Tn7 System Protein
MIMSRLTREVELRLPLFEKPWVARLYKNFSDWSAKRGVRTPQLPENVAKAVDFFLILDHAKDLREPLTGDDLVRSFSSKALRANLNAAIFLQQQFGFVIDGKVRAEAQSRALIKDKLAAAAGTPWHTYLASYHAWLTGKPARTVAQYVGVAEAFCRQFEVSGPFSQEELVEFLASKPGARTNLGPWVSFVQKSLGWAVTLPPKMISAPTLRTDAARLEKLLDAIGDASEATTQDLEEIVALAYGFKKRELSNEVLGRSDGHHLLTRNGLIEIPEGIADLVATWLQRRGVPA

SEQ ID NO: 4203 - protein, 220 aa, synthetic construct
  REGION 1..220: note = TnsF-Tn7 System Protein
MTRLSSAAPVRALKNSRRALTGKVTLGGGEFAGFESSLERDWLRLLDFDPSVIALREQPFTIYYEAEGRRTRYTPDVLAEFLLDGTVKTVIYEVKPLETLRADWQLLRPRFKAAVKHCRANGWQFRIVTERHIRTPLLANATFLRRYRAMAPLLVRQAQLKYTATVLGPTTPQALLAAAYWPADEQAQAIPALWQLVASGEIEADLSKPLTMATYIRLRG

SEQ ID NO: 4204 - protein, 630 aa, synthetic construct
  REGION 1..630: note = TnsF-Tn7 System Protein
MSLSNFFKVEPGAQVFVGPRKYRVTHMLSIDSVLAEDMETGASARLRIETLSMIVSAEDASGAAGFPIHQYSKEEWSVAQKRFEALRPMIEHPIRSRTEVEKLASVAGVHVATYYKWLAAYHDAGHVAALVPRKRGAAKGQKHLAADQELVISSVVEDMYLKKQRHSPKEVVDEVLQRCKRAKITAPAPSTIRRRLKELSPAMTLRRRGFKDKARDVYEPIRGSFPGADFPLAVVQIDHTPLDIIVLDEVHRKPIGRPWLTLAIDVYSRMIVGLYVTLDKPSATSVAMCISHAMTPKGEYLAALGVEGNWPVWGQIGTLHADNAREFKCKAVTRGCQANHIDMQWRPVKKPHYGAHIERYMGVVATELKKVPGATFSNIQQRKGYDSEKEAVCTMKEVEAYLVEFIVNNYHQRSHSQLKDASPTRIWQQGIVGTSERPGIGAMPIVGDPERIRMDFLPYFEITIQRSGVRLENVFYYDPVLDPYIGATMPDEPNAKRKFIFARDPRDVSQIYFLDPKADRYTPIPYRDLSHPPVSASELREVTKALRAENKGEVDEHRIFSSIQRNRDRINASTESTKAARRQAASRPKTKPVPAQSPAATQAPAYERAAESVLSIFDQELEVFEVGELN

SEQ ID NO: 4205 - protein, 695 aa, synthetic construct
  REGION 1..695: note = TnsF-Tn7 System Protein
MHELLCSPHLDLIASTSLHAPLRVSSAILRVTSQEVPSRAQVNKRTADRVALLCIDWRTMDFTHYPSDSRLYFIRWIDRYTKPHKASTSTSVCCYLVPLPDDIKDPAKATPDRIAKLFGYSDQVPFVAMVLVGALPSIRIGYVYRDRKRVGVLPCQEMSLGDALSHGEASSKYGPNIHLDTIIGKSGDFPIKAVPTSQLHLDHSVRSASGVLIAQDSASGVEFLIPRSLIFRTFYAHSTYLASVFTTGIWRETVGKVLLLGKEFAGNWTQELEDPRQFHLVMQRGMRKDDATSIALLHFYPYGNAAANALYVPMLTAQNKAAFGGDFSWYSNAQIPMDPDLGPYRGRVMGYYLTPHKGRRPCRTFLVTSLLGLSLPHDFPAVGDILVNDGNRDGDLEHTDDARPYGGAPDRGRKRPNGMQDDDGHNASTVHQAFDEPSDTFKWINPPPRFDLVKNHTTVYTAPRVPGPSTSTEEGSFGDRDGAKDSNSALDARLKNRASEHNFNALLRALKEVKAAGAIADFSQVYPQDSTQRVPIGSCICWNFLDETQRAISYDRLVRKGWAFLHREGKRSGGHERGALVLDVALSDGRTGFWIEIQTRHGAMSPLLIDDGSDPTTQISRALNIIFSAKGSNLDDHFRASSVKAYCFTHRYVSPDKDAYEDENKDRRDEWDTDWLIAFFKSVSLGKQGTGAATE

SEQ ID NO: 4206 - protein, 295 aa, synthetic construct
  REGION 1..295: note = TnsF-Tn7 System Protein
MGAYPHLLPQVAERMEDSEQARIEFARSDRWIAYPVARGVIDDLDQIIAYPTTQRPPCRLIVGRGDNGKTAVLRQFQQRHPITIREDGSPNAPVIAIGMPATPDLSQIWTEILQSCAITHRRSDPAHAKYAQVLGALRYVKARVLLIDEFNNIVNARKGASDVLAGLRKLSNDLNLSIVAAGTESAINSLSFDAQMRSRFKPLALTRWSLDVAYLSFLKTYEKLLPLPAASNLAGIELAQLLFKAGGVAIGGTVYLIKEAAVTAIRSGQECITPTTILDTQERLRQNYEGVVAST

SEQ ID NO: 4207 - protein, 295 aa, synthetic construct; identical to SEQ ID NO: 4206
  REGION 1..295: note = TnsF-Tn7 System Protein

SEQ ID NO: 4208 - protein, 546 aa, synthetic construct
  REGION 1..546: note = TnsF-Tn7 System Protein
MRLMGKRQRDCLDCGAPVGYIGREHCCRCTRRLREQAAKARCPGCGQGRVLIPETGRCVLCSRRCRECGGPIKFRGETVCRPCQKRAALAAAKSACPRCAKPGYLRSTGWCGRCSRPGPPKEPPRICVSCGELRRHAGRGMCGRCWQRHPDRPFVRGETLAAGLAEPPDWLDDFVAHLAAHHCPARACRLITTLARLLEDEHPNHPQSVLERARRPGRSMGSLARALETFFTERGLAMATDQDQRLAAGRRKKRIDATPAPMRAAVAAFAESMLHARDRARRAGTRPRTDRTIESALTIVRDLACFLDTHRGKQDWALVDVTDIEAFLAGLPNTRARRLTVLGQFFRFARNYRAVLIDPTRGMSAKRHRGFRGRTVAITQQRTLFRRWSADPAAHPHEALFGLLAILHGASSRELRLLQVDHIDTSDRSIRLGKRPHPVPLDPVSWIALQRSLDHRETLRTNNPHVIVTRGTKADRRPASEAYMSHLLDPCGLPPKMLRSTRLADLVNTIDPKLVAAAFGMRPEGAMIYLADHLDDGRLPEQLAEP

SEQ ID NO: 4209 - protein, 355 aa, synthetic construct
  REGION 1..355: note = TnsF-Tn7 System Protein
MRLVEGLRLIPGGAAPVEPISADPVVFQRECVDAFVASWHARGFSLVTIDNDIGLLERTLAALGRPAWEVTSEDIDRVVGELAMAGRAASTRREYVQIFKGFHRFLQTRKAAEIEAMFGTRLVCPVDEFNASRHVGDDSPAVAAPPTPERVSEFFEFLKSRIATARKYGPAARDYAMFRTLYHAGLRSEESALLEIPDVHFDRGPFGKLHVRFGKAAHMSGPRPRWVPMLDGLEVLLRWFLADVRPKFPDSPVLFADESGGPLHRGTIRNRLRYLMELEGRPATERFSPHALRRACATHNYERGVDLVAIQQLLGHWTVSSTMRYVRPSATFIEDAYRRAVTSTLAELSGEDGTA

SEQ ID NO: 4210 - protein, 104 aa, synthetic construct
  REGION 1..104: note = TnsF-Tn7 System Protein
MKIRWRLRMAAAQREVWTGTELRRLLAERAGLELSAASVSALLTKEPTQIKLSTLIALCTALDCTADDLFEIDTTPVEQIAPSPRPVVSEPKTATARGRSMPPM

SEQ ID NO: 4211 - protein, 222 aa, synthetic construct
  REGION 1..222: note = TnsF-Tn7 System Protein
MFVVARMTRVNQNVRIGHRVARTTPPITQDQRIAWIGELLTGTSDTLPYRVAGTLLLLFAQPLVRVAALRTEALIDTPNGLHISLGREPAPVPDLFAELLREHPEHRPNLRTGTGRDSPWLFPGTTAGQHLHPGTIMTRLRDLGIDLRGTRNRAITELVLQAPPPLVADALGYSYQVTYNTPNEAANLGLATPVGDDSTYPGGLARPYDPRDHHRRPRRVGV

SEQ ID NO: 4212 - protein, 222 aa, synthetic construct; identical to SEQ ID NO: 4211
  REGION 1..222: note = TnsF-Tn7 System Protein

SEQ ID NO: 4213 - protein, 572 aa, synthetic construct
  REGION 1..572: note = TnsF-Tn7 System Protein
MKGGAPKSCPRCRSKPVAWTKPLRVDYCYDCLPGGPYTPPPCSRCGSTKDYYSAGLCVLCHPKAPQQPGSCKDCYAWGVVRKHKWLCWGCRSWRTKFEIGTCICCRREITVNDDGVCRLCWRQAASLRWTKTGLSLTDANQYGQQLFLANLHQRGKRAAPATPYAKLPPPTQTPPRVVAHRQLALLDLPRDLPAGLRAGFPPPPDPEAAEFLFSRAREHAQQHGWSYSTTKKVCRGVEILLSLQDTPDAPILTSLINQLPSIHLPAKLITEFLDSYALIEDDVTPATEIWFETRVAGLPGTMVDELRLWWTVLRDGHVTVPRSRPRVRVTAQIKLRWASPTLRHWANHGVQSLREISRDDVVAVLPASGNDRYTIGAGLRSIFKVLKTHKVVFSDPTAKLRLGAPERRQPLPADLALMKEGLTSPDPSRAVMTALLAFHGLSSGQLRNLRLTDIRDGRLHFDDRTILLAEPVRVRLTAYLNYRNQRWPRTANPHLFVHYRSALGTKPVGTRWPGLVLGAAARDIRTDRILDEVRATGGDVRRICDLFGLSVGAAVRYTAILDHPGLHDVATK

SEQ ID NO: 4214 - protein, 172 aa, synthetic construct
  REGION 1..172: note = TnsF-Tn7 System Protein
MIAWLNGTFGAGKTTTARELTQLIPQSRIFDSEQIGYMLRHVLTEPVDDFQDWPPWRPLVTRTAVEILNYVGGTLIIPQTVLVERYAREIFQGFDSEGISVQHFVLHASADELVTRIEGDQIDTMAREWRLKHIARYQEALPWLRDAATIVDTSGLPSQKVAQDIASQLRQP

SEQ ID NO: 4215 - protein, 172 aa, synthetic construct; identical to SEQ ID NO: 4214
  REGION 1..172: note = TnsF-Tn7 System Protein

SEQ ID NO: 4216 - protein, 361 aa, synthetic construct
  REGION 1..361: note = TnsF-Tn7 System Protein
MSLAVVRSLGSGRRLRTPQELEDFEQELVDQYLLAAVGAGVGDETIRRDRLVIFEFVRFLGRPLWTAAPEDADRFLSSQRKKRQLARSTIYNKSLTLSQLFDFLVTRYQGDVHAMTGHVLVQPIDEFNRPTNPDYGECRIPPSDDEVDLLFAGWRSEVPQSRKYLPAARDYLAASLWRPVGLRITETTMLDIRDWRPDLGELGKLHVRYGKGSQGRGHKTRLVPAINGADALLTWWLTDVRHQFGNDWADLDAPLLPSERRDRDTGHCLRAGANTLRSGFAEAVAEHLPTWKGRLTPHGMRHYCASSLYARGVDLKAVQELLGHEWLSTTTRYVHVHDDHIEHAWAAANDRIAARLIDQEG

SEQ ID NO: 4217 - protein, 105 aa, synthetic construct
  REGION 1..105: note = TnsF-Tn7 System Protein
MRWNLRMRAAEAGIWKSTELRRLLAEAGLEISAGKMSGWWTTTPTTFRLDDLDVLCSVLGCQPTDLLICEPERVAARKPKKSNEATTGGPTVTPRLGRNRSKPPV

SEQ ID NO: 4218 - protein, 459 aa, synthetic construct
  REGION 1..459: note = TnsF-Tn7 System Protein
MTASRHPTPPSAAAVEGEGAAQRLHTRLRRALATELPARVETETGAGESSLPLARRREIGREVLEGAVVAHSEAELVAGRELVDSGTEQGLVEQVLDEVFGLGGLQPLLADPTVETIAVNRYDRVFVQHTDGRRTQAAPVAASNEELTDLVRTLAARASSEERRFDRGSPALNLQLPGGERLFAVLGLTAGGVTACTIRRHGYLTATLAQLRRRGTLDAGLERFLRAMVRARKNVLIVGGTGAGKTTLLRALAGEMDPLERIVTIEDAFELGLGLDPARHADVTALQAREANVEGEGAIDQAELVRWGLRMSPDRVIVGEIRGPEVIPMCNAMSQGNDGSMATLHASSSKIAFTRLASYAAQGPERLPLEATALLVASAVHFVVHLDRAADRTTRVIASIREVVDAEAGSVISNEVYRRGPDRRAVPVAGALRADTLDDLVAAGFDPDLLCRPEGWWTP

SEQ ID NO: 4219 - protein, 459 aa, synthetic construct; identical to SEQ ID NO: 4218
  REGION 1..459: note = TnsF-Tn7 System Protein

SEQ ID NO: 4220 - protein, 379 aa, synthetic construct
  REGION 1..379: note = TnsF-Tn7 System Protein
MTTPATIPAPSAAPGAATRLRNGELRRRVAEQLASEPTAELTPGAIARKLGHSSGAVGNALAKLDADGAAERVGVSPATYRATPKTADAAKRATVSPPTSPPPSTPPALAEPPVVTGPVRRPNGQMYHPRKLSNLPDVTALRRLRKAGVAALMYGPPGTGKTSVVEAAFPDIVTVQGDSDTIVDDFVGSYVPTPEGSFKFVDGPLVTAMREGRALFIDDATLIPPPVLAVVYPAMDGRRQVTVKANKGEVVNAAPGFYVVAGHNPGVHGAILSDALSSRFAAQIHVSTDYDLATRLKIEPKAVRVAKNLALRQEKGDIGWAPQLRELIAFGRIAEALGTKAAAGNLIGVAPDEDREIVAEAVRSVFGADIAPLSLGPQI

SEQ ID NO: 4221 - protein, 379 aa, synthetic construct; identical to SEQ ID NO: 4220
  REGION 1..379: note = TnsF-Tn7 System Protein

SEQ ID NO: 4222 - protein, 285 aa, synthetic construct
  REGION 1..285: note = TnsF-Tn7 System Protein
MSGAVLESTSLAADFAEFGTWLDQEVGSLGATQSIDRYFNFFLELDGLWGRIPTYDNLLSHFGAEGLRRYRLPMRWLQAQRSVVVNQERREQDSEQRRIAGALLAFPAASSARPLLQAYLDHLMKRVETKRTTLRSVRLALTPATGLLRLMQDRELSLPDQSLLDAYLKSAPGQRAAVSGFLNFLEQHVGVKLTSTDMKEQSANEKRRTLERDMLAFLRRECFQQTDERTWQSLGLAYFHDLPRWSLKRLPAAERLEDGSYVVVWKGSRFWLPQVPEIAVKNNRE

SEQ ID NO: 4223 - protein, 601 aa, synthetic construct
  REGION 1..601: note = TnsF-Tn7 System Protein
MPPISRSSLFGTERVAALRKLQGEIVIWWYGPVVGLTSTRQSPNIIVFVRPVLPDSSLGDILTVKVALNFLGLLRIGTVWMEGVCVGEWTFLQKNMTFSVNFVPGSYEIVSPHDNPELPNVSSDYPLPYSRDKNWMLRFPVQGGRQLLIPCMEFLARGYGSNKLISQTLSTLPWEDCLDRFFMPTETGKTAEVWPIKLTERMREQDAVLLAHLLHDPYTQRAAKSIYGQLGSRDQRDLTFLKIIPWFQGQASIRVSGLWVDRGNTFLALRLSGMSDPEGVSILIHRNTFVDENPALPNDINDTGNLDRFGTLLVTPPIVDLTDQIEPDRNPPQIAVVEPGFALLGHPRTILTLPQYQRRQMWRKDTIASELANETHLAGIGEGEGADKDVDEADIHSTHAVPSLGVVFDLWNIFKERSGQAEGGILEVAYFTFEDGFQTDNPPLFIALRKPDENAEWKILRWTQMFPDNPASRMRGILVFRLTLTEGIFYLFEVERRFRHEEEEDGSLGERFTEEAFKGFLMVASEEQFHVWLPHFLDKVRETQGVIKNIDFPQDQILTTVFVHSSGKDTSRPGEYAVENALKKARVLLTKINLIEAGQSD

SEQ ID NO: 4224 - protein, 285 aa, synthetic construct; identical to SEQ ID NO: 4222
  REGION 1..285: note = TnsF-Tn7 System Protein

SEQ ID NO: 4225 - protein, 223 aa, synthetic construct
  REGION 1..223: note = TnsF-Tn7 System Protein
MTVQQVRRLQPTRRSVSGIYAFRGETGIEFESTLERDFLVKAEFALDVLDVIAQPVQIPFVHPNGQTYHYTPDFLVYYRLGSRDVSRYPAPLLVEVKPRAEWQQHWREWSAKWKAAMRYARDQGWSFHIHDESRIRDQVLLNIQALERYKRSSVEPEVAAEVMQTVRDMGHVTLDLLLARHFMGLYRDAGKRCILSLLATRQLEFDATLPLNDFSELWMPTDE

SEQ ID NO: 4226 - protein, 644 aa, synthetic construct
  REGION 1..644: note = TnsF-Tn7 System Protein
MNDAESKRAEINERASFAPVRGQMKLEVGALVQQGKAVYRIAQLLDLTTLVGMEVESGRASVLRIRELTPLQSASETQPNTDLEDVADEGWRIAQQRFASIAPLIHQPFMTAQQVETRAQEVGVNAATLYRWIGRYRESGVVTGLIPFKRGWKEGRGRIPVPTEAVIAEVIKNYYLNQQRPGVEKTVREVQRLCLERGITAPSPTAIRARIARVPERERLRSRGFAEQARHKFTPAAGKFPGADFPLSVVQIDHTPLDIIVVDDEHRQPIGRPYVTLATDVYSRVITGYYLSLDAPSATSVAMAVAHSILSKEEWLILHDVKAEWPVWGIPKTIHVDNGAEFRSGTFQRACTQYGIHLEYRPLMRPQFGGNVERVIGTTLREIHDLPGTTFSSVKERAGYDSEKQSALTLSELERWLVTWLCTVYLRRKHASIGTDPLTKWQLGLLGNAEVAGIGIPALPADRMTLLLDFLPSYARTVQTFGVSIEGWTYYDSALRPWINAKDQDTGRGRKFTFRRDPRDISSVWFFDPELRSYFKIPFSDIRTPSLSAWEDAQIKERLKREGTTQPTTDDLLRALSGLREQVDAAKSRTKKARRQAQRQKVHRQGVTPAEPLATTASALLVPSTSPAAAPLLVGDIQPFGEIE

SEQ ID NO: 4227 - protein, 369 aa, synthetic construct
  REGION 1..369: note = TnsF-Tn7 System Protein
MATPVQWHPGTAPLAPLWSVALPLLPDELLSSWLIRSALAQGCDPSVLTGAVWPRWRVWGLDVDRGVGAERLSALSRCAGLPASAFEAACLRRVVAPLNTGPLAEVGTWGWMLTLGARQGRRQGGLQMCPDCWVTQAIPYYQMSWRLAWQTCCRTHGVRLRDRCPHCDAPLEPHRLEAISGTLTLCARCLGDLRIGERSLWSEPAATVQQVADGVALTGQGTFWGVTLEAREWFAVVRRLLNLLRRAAKYPDSAVTAMFAALEVPIARLSSPATGLPLELLPVQEREALFTALWPLLQADQNQWLQAASQAGVTRSAFLSRDETLPLIWESLLQALPEHRRVRPSKSDSRPPKSQRAVTRLYALLRRKV

SEQ ID NO: 4228 - protein, 296 aa, synthetic construct
  REGION 1..296: note = TnsF-Tn7 System Protein
MTYDHLHPDFRHVMLLSDAERIEFLQQPRWISYADAQHGLDTLQSLFHAPKRPRMPNLLICAESYNGKTTLIRRFQHLCGQGYMDAQAEPVKPLLLAEAPPQAGEKEVYVCLLEQFFTPYRITDPPAKLRYQLIHLCRVCKVRMIIIDEFHSLLEGTSRQQRVVMNTLKLLCNELMIPIVCVGTQKAKQALQIDPQYASRFDVLTLPLWKLDPDFQRLLAGFERILPLKHPSNLGAVELAPLLHTISGGNLGDLHRLLMECVKEAIVRRTERIDLPLLERKRQWQRPSNGIRELPR

SEQ ID NO: 4229 - protein, 296 aa, synthetic construct; identical to SEQ ID NO: 4228
  REGION 1..296: note = TnsF-Tn7 System Protein

SEQ ID NO: 4230 - protein, 309 aa, synthetic construct
  REGION 1..309: note = TnsF-Tn7 System Protein
MSAGRGTECEPCYWTALLSKRVAINLNGLSTILGEAFKAFSLWLLERSGPHKAALSINGHYLFFRELEVTWGSVPSYELLLDHFGAAKLRRAENPMRWLAESGHVHVSAASREHHTEQRRIYAVLAELEDGWSRKLLSGYYAVLSSRVSRQEADLRSVRLALRAATNFLKSARLADEVSPGMKAVEAFWRSSPGQIAAVTGFIGHLNRTYGLQLEAKPDKRWLQKAKKAKAERELVALLRNQDQGDFEVRWIAKALHYFHDLPRISRKALVYRAERFDNTDGFSVEHGTSTLWVPAASSFRHSQELRKS

SEQ ID NO: 4231 - protein, 327 aa, synthetic construct
  REGION 1..327: note = TnsF-Tn7 System Protein
MANGKILRQLLKAGAIGDQAAFRRASEAIIEEERQKQHHLLANDLEQILYGGDMHIQSARKPQFAADIPVDKERGLPLLDIRPPKRSLEEIILPESSASMIEEMLEEHRRSDVLRSYGMKPSGKVIFFGPPGCGKTLAAEVIAFELDRPLAIVRLDALVSSFLGETAANLRKVFDFIAKHQLVVLFDEFDAIGKERGDSGEHGELRRVVNAVLQMMDAYDGQSLILAATNHENILDSAIWRRFDDAIEFPLPDRKQLTALLQLKLRGIRRQFELDDAELLKEFDGKSGADVERVVRRAVKRMILRNQEFLTVKELRNALVREGLRKH

SEQ ID NO: 4232 - protein, 327 aa, synthetic construct; identical to SEQ ID NO: 4231
  REGION 1..327: note = TnsF-Tn7 System Protein

SEQ ID NO: 4233 - protein, 611 aa, synthetic construct
  REGION 1..611: note = TnsF-Tn7 System Protein
MRRKPAAGWVHSRLAHYHYGSGVLVQPVERIDFSYPRSDLRTPDSAIAKLHGDHIVWWHNHIRHNARAKTMPLVELHLKRLYDNVPGPDTRALVPLSNVPHYGIGTIWREGRCISDTKLTRLERDVDFSPGGWSITSREQLIHEDMEHVFSDSEYPLRYKYDRGHLLNFKLEEEDEDGNKKNLLVPCIDFFVKAYARNMDVCRAITTLLYPNILSVFYDPPERDEHAWIVRPTHKARKYDSAFLGHLLYDDYTEEQVRRLNNQFVTSRPGDAVFPRVEPWFSGPARLRCYGKWINNGSTFLSLNLAGASEPDGTPVEWTTNQFDSSYGKDRGRIVMPVTVRTAEAEEFLAEESYIEPDGHAEITIVKTPPFARLGKAREVITVRNVIQTDRGRLGPRPPKPETHANGTGFGRGKGVGKSEHVADNTPDAEVESFGFLNDVWHAFLSIKKDNPGRVTDVSWYTPPRFCSNTTPRIILFTAEGLRPDQGKALRWIYLNAEFTERRGMMVLRIIVDGQAYLCFEIQRAEPDEKDKKPIGYSGVLMPCNITDPVEMEQFVNRVCNATRRALGNFWDVLGLFPSTTIIFRHRPHGKALVHRRRFINAFGQMKIKLI

SEQ ID NO: 4234 - protein, 309 aa, synthetic construct; identical to SEQ ID NO: 4230
  REGION 1..309: note = TnsF-Tn7 System Protein

SEQ ID NO: 4235 - protein, 191 aa, synthetic construct
  REGION 1..191: note = TnsF-Tn7 System Protein
MLERDFLKRMRFSHRVESVIAQPVRVDFVDALGRAQTYTPDFLVHYRQPLGVDYMNYIKPMLVEVKPAYEWRKNWRTWLEKWKAARRYARQEGWTFSIYDESRIRGLPLDNITFLERFERLDFDREDIDMVLKTLHEMEFAPVHYLLARHFKGVYRDRGVALLWHLIATGRVECDITEPLNEYLELWVATP

SEQ ID NO: 4236 - protein, 640 aa, synthetic construct
  REGION 1..640: note = TnsF-Tn7 System Protein
MNIYEIDTDEHLVPFEPSRERVRVEVGEMVRRDKQVYRIVQLLDFQNVVGVEVETGRSISLRIPELQPVEQERVDGLYVNYDISTISSDEWAVAQKRFSAIKPLLRDSVLPRSSVEARAKEVGVDTATLYRWLDRYQSWHEVLALVPRKRGWQPGNSRLSAQANKLIDEVVDKHYLTTQRHSVQSTIKEIETQAKALGITPPSASAIRTRIKRIPEKIVLRRRGFADQARNRHTPSVGQFPGADYPLAVVQIDHTPIDLIIVDDRHRKPIGRLWLSLAIDLNSRMVDGYYLALEEPSEISVAMCLAHSILPKEDWLNLHGIQGEWPVWGFPRVVHTDNGPDFRTENFRRSCSNYNIENQFRPVKRPKYGGHIERLLGTFMRELHALPGTTHSNVSDREGYDSDKHAVLTMSEFEEWLVRTIILYHNKYHSAIYMSPARKWHLGFFGSREVDPLVSIPPRPADPLTVQLDFMPSYRRTVQHYGVQLDVYYYSEALRHWIGTTDPETGQARKFVFRRDPRDISVIWFYDPVLKQYFRVPVANQAFPAATLWEFRAAKKQAVDEGRKHIDEALIARMILERRQIVDTASATTKKARRDAQKNKVHSKNSTPARPVKVPVEAPPSISASDGLLLDDVDLIGDIQ

SEQ ID NO: 4237 - protein, 296 aa, synthetic construct
  REGION 1..296: note = TnsF-Tn7 System Protein
MTEYAHLHADFRPVLQLSDRERIRFMGEPRWIGYQSAHHILDSLECLLDAPKRARMPNLLIVGEPNNGKTTIIQHFDNTHGKGYTNDNAEPVRPIIVAEAPPSAEEKDLYVAILDQLWMPYRTTDSKVTLRFQVIHALRHLNVRMLIIDEIHSLLTGPATKQREVMNAIKMLCNTLVIPIVGVGTPDAVQILHLDPQHASRFDVIKLDTWKLNADFQRLLKAFEAVLPLKKPSSLFKPELAQLIHSISGGNTGDLHGLLMECAKEAITSGKECIDRQLIESKSWKRPTRGIRELIV

SEQ ID NO: 4238 - protein, 296 aa, synthetic construct; identical to SEQ ID NO: 4237
  REGION 1..296: note = TnsF-Tn7 System Protein

SEQ ID NO: 4239 - protein, 777 aa, synthetic construct
  REGION 1..777: note = TnsF-Tn7 System Protein
MSRKRDELRAEERAARRIRNQAALTATLPGVDDARAAAILESLGADRGITLRDLDEHLTAHSDALTSGDPRCPAVVVRLARALRDAGHDAIASPGCSECGRTDVDLPRGGPKGRVCQACSARSPDNKKPCGRCGRTARIFARRDDGGICDSCYRNDPQVVEKCAGCGRLRMPVTRRLDGRPLCENCWTPPEHPCTSCGRLGQAHSLGPDGALCQACYRRLAQQRRTCGKCGDVRQIARRATSDNPDICWNCNTPPDASCSVCGEVRPCTRNAEDQHVCRTCRPRRTSPCSNCGQARPIHAHWPLGPVCGACYVRVLDHPDQCQRCGTPQPLVARDESGGEICGPCSGLAGLYLCPGCGQGGRLYADGRCPRCILPLRLEAHLTGPDGQVSAQLRPLLGALASADSPRGVLCWLQRSPNAQLLGELAAAGQPLSHDLLDELPPSRYEHYVRRTLVHTGVLPERHEELECIATWLDQLLADRPAEHARLIRPFVHWFLLKRTRRRATQRRHPAMAGSYLRTRIRVALELLTWLDEHELDLEHLTQDRLERWLTAGNTRTYNIRYFLSWAASRSIAPRLTVPAIPRQEPERILNDDERWDQLKWCLNEQSLALDVRAAGALVLLFGLPTSRIRHLRAEHLHVRDGDTYLDLGLHPMLVPPKLAALLHQLADDPVRQPRITAEGPGPGRLFPGLLPGRPAGPSGFSRKFLDHGIDASPARNSALVALVTDIPPAVLADLLGLHVTTTIRWATVARRDWSDYLAARADDYQEREQAAHVNQS

SEQ ID NO: 4240 - protein, 777 aa, synthetic construct; identical to SEQ ID NO: 4239
  REGION 1..777: note = TnsF-Tn7 System Protein

SEQ ID NO: 4241 - protein, 721 aa, synthetic construct
  REGION 1..721: note = TnsF-Tn7 System Protein
MQHTSTADLRTEADTVLARLVGDPTGEARLREDQWRAVEALVAEGRRALVVQRTGWGKSAVYFVATALLRARGAGPTVIVSPLLALMRNQVDAAARAGVRARTINSANTEEWESVQAEIAEGVVDVLLISPERLNHPDFRDRVLPSLAAATGLLVVDEAHCISDWGHDFRPDYRRLRTVLADLPAGVPVLATTATANARVTADVAEQLGTGGASDALVLRGPLNRESLSLNVLRLPDAAHRLAWLADHLDDLPGSGIVYTLTVAAAEEVTAFLRQRGHAVASYTGRTENAERQQAEEDLLGNKVKALIATSALGMGFDKPDLGFVVHLGSPSSPIAYYQQVGRAGRGVDHAEVLLLPGREDEAIWEYFASLAFPAEELVRRTLDVLARAEGPVSLPALEPLVELRRSRLESMLKVLDVDGAVRRVKGGWTATGQPWSYDADRYAWVARQREAEQRAMREYGAATGCRMEFLQRQLDDETARPCGRCDNCAGARFTADASTAALDAARVDLGRAGVEVEPRRMWPTGLAAVGMDLKGRIPAGELAAPGRALGRLSDIGWGNRLRPLLAPQAPDGPVPDDVARAVVGVLADWAKGPGGWASGAADAPARPVGVVTVPSRTRAALIGSLGARIAEVGRLPLLGGLEYAEDSSRVARSNSAQRLKALDGALSVPPALAAALAGAQGPVLLVDDFSETGWTLAVAARMLRRAGARGVMPLVLALQG

SEQ ID NO: 4242 - protein, 311 aa, synthetic construct
  REGION 1..311: note = TnsF-Tn7 System Protein
MNEGIEGLFARTEDFPNPSAQARRAALVGLDDLIERLVTDAVALLDPSVMEAWSVDMHGEVIPAVRALLDRTPLFVFAGDVGVGKTEVAEVIGQVIATRTNADVTLYPLSLTARGRGAVGEMTTLLTRAFERLSADFAKARRGSGSASSLGILLIDEADALAQSRELTQMHHEDRAGVNALLRGIDGMRIDRLPILTILCTNRLDALDPAVQRRAATIEVFERPSHMQRAALLTRLLAGTMFSPPDIEALASATGETVGRPYAYTYSDLRQRLVPEIVLAAYRQRVAVDAAIAQGVLVRTPPTRPFGAVSR

SEQ ID NO: 4243 - protein, 311 aa, synthetic construct; identical to SEQ ID NO: 4242
  REGION 1..311: note = TnsF-Tn7 System Protein

SEQ ID NO: 4244 - protein, 106 aa, synthetic construct
  REGION 1..106: note = TnsF-Tn7 System Protein
MIKKMGTTWNLRKLMATRDMFQTTDLGPLLAERGVHLSREQVFRLVTQPPQRLSMDTLAALCDILECTPNDLIEVQVVNAQVSKAFGDDVTPLPQARRTVIRRPDQ

SEQ ID NO: 4245 - protein, 750 aa, synthetic construct
  REGION 1..750: note = TnsF-Tn7 System Protein
MSAPLRTDEAHRRVVAHLTSHLAGVTSAQAREALEQAKITARSCVSLSRHLEHHADALMNPGPTPPATLVRLAHALAAAGHGPVALPMCTGCGKTSPYLTHRIAAGRCCSSCSYRVRPAKTCAGCGRQMRINGVGPNGPLCGTCYGKHTATACGGCGRVRRACWRMPDGSVRCQGCRERPEHTCVGCGTQAPAQALSEDGPVCRRCYQQPKRPCGECGEIRIINKRAGQDAPDLCSACYRPPPVACSSCGRIRRCAQKRAGQPLCQGCAPRPRRACIRCLRELPVHAEWPMGPVCKNCYTAIRNHPSACHQCEQRRPLISVTDGGRSICGPCAGTDLTYACQQCGVNDKLYREHLCTRCFATKQLGRALGADGAATPVAVQDLHSVLAGAGRPRRVLHWLTLSGVPALMSQLAGAEDVTHQHLDDLPNTPSTRYIRDVLVAAGVLPVRDERLEGLPRWADALLRQAPTHHRHLATPFAHWYLLHRIRRANRHRALRASTERGMRSKLRRALELLGWLDETGIGLGQLAQPALEEWVEEGPANRRDVRAFITWARSRHLAGDLTIPPAVVPVPSAFTTEIELTDQLHRCLCDDAMPIDVRTAGALMLVLGLQPTKLLELTVHDLVDDETAAFLTLDGQRIPLPPKVALLVRALRDRCQERWQLNQTASTTPWLFPGQEPARPLGATYLSLKLRQHGITPRAGRNSARLALAADLPASVLADITATSISSATRWTGYARHDWLDYIATRQRN

SEQ ID NO: 4246 - protein, 750 aa, synthetic construct; identical to SEQ ID NO: 4245
  REGION 1..750: note = TnsF-Tn7 System Protein

SEQ ID NO: 4247 - protein, 703 aa, synthetic construct
  REGION 1..703: note = TnsF-Tn7 System Protein
MSVPRSVALERTFYTLTTPVLAAAPNLFADSPVNTVVQLAGAAGVGGWVLAAKREDSGAGRKILRWSPLVLAAAVDIAARNTIGWGPWCLDGILAAGWATAGLLVMPFSRHTRRRHRPALAAPAPATQLQAAPEPSLAQPDDGADAFTRQVRWLWEARGLPGRTIVITATPHAGMPNDLSLLLRASEAGRPISSLTEEAVAAAFGVEIADVRIEDVVRQYGREGGPGWKEVHVTPDLNERRRKAPTTHEWWADRIAGGPVPGSEFIKKVRDGERKVTHYIAQVPDEMGEPRVNQHTLAAALKTKYDEGRLFVTVDGNQVLVSLWDSSPLAQVFPATRELLTPDKDGRWVTGYLGNGQPARNRVYTDRGAAHGLFVAPSGGGKTQLMGLHVAADALFGAVVWLAAEAPDEKAAKLGEYTDRYGVGALYMIRLLRTLDALMEIRGEMPWEDGRVYDWDPKLPGCPYRMLSAYLDEFLSAARNGDYGAEIMDLAEKVSVKGRKYGIGLKVAGQSIYVQDGFTQLLCENLRENCIPVVLKVAPKKVAEMFKTLGISSENTPDPLPRSFSPAEAGRIERVMAGEPEPPANSNTGGAGWIVEAKQPEVLRTLLMDFKKSLDGYFPDIVASLTDYEIRELEARDLWFDWTEPPRPGEFGPEPSDDEDGDGDDKPKKGGGKPRGGGKSAARRDAVTSPRQALEAIKNLSGV

SEQ ID NO: 4248 - protein, 401 aa, synthetic construct
  REGION 1..401: note = TnsF-Tn7 System Protein
MSSPNQGGEREKLISKLPAYLQQALKVRAAQLQTDMQDAVTAGIQAWRASSEQLPTVDTAGAASFGTFLPEGLYDAFKEDCRDRGVSYIQGLAQSVALWLVEHPADLDAEPHTRRIIVCNQKGGVGKTAISAGLAEALAEGSIAASGGALETASEAAADGLRVLLVDYDAQGHLSHQLGLKAIPAGEESLITHMLHREQAKHSLLDLTVTIEGARFGGRLRILPAAFDAFLLDSGLTVFRGPRHATLERALAPIEEHFDVIVIDSPPSLGLAMDAALYYGRQREDEKPGSSGLVIPVEAEDTSAQAYGMLIQQTDSLARDYDIAIEQIGLVVNKFDSRRGYIATSSLDKWKALGTPPVLAVVPDLKEQREAVRKQRPLLDYAPDCDQSHQMRKIARAVKTA

SEQ ID NO: 4249 - protein, 170 aa, synthetic construct
  REGION 1..170: note = TnsF-Tn7 System Protein
MWLASNNACPKPLVKTPGPPLASAIPLTQTPCVVADNLYRLEALLKPLSDARRAELGWNGSEGSGDLLLVRRYIGPEICCCGAGATARSSPTETASRRGLGADRLVLAQRNDVDGAGDAGFDVLVGCLTGELMHDPDVRCTVHGPHGYDQDDDLEGRTDLEAEYAEAVRG

SEQ ID NO: 4250 - protein, 170 aa, synthetic construct; identical to SEQ ID NO: 4249
  REGION 1..170: note = TnsF-Tn7 System Protein

SEQ ID NO: 4251 - protein, 376 aa, synthetic construct
  REGION 1..376: note = TnsF-Tn7 System Protein
MSVVDELPGAAHLVLADGVVHLDPEPAVLEAMLEGRARQQRTRFLNFESTIRPRISLVRRLVAFTNEYPWEWAPGEVEAFFDHLRTRRPGRPLTLSTARNYQNDLRLFFDYVTDARYGWPATCRERFGQAPVQVLHEWNTVTHTSGYEGAAERRPLTYDEVQGLFDAADGRVEEIRKRGRKGSLAALRDAMVLKAVYAYGLRRQEACGLDLCDLRRNPKVAAYGRFGAVFVRHGKASKGGPPKRRTVLTVPEMDWIVDVLDQYVAEVRPAFLPGKHPAFWITERRGRMSLRRLNDAFEAARRSADLPEELDLHSLRHSYVTHLIEFGYPEKFVQDQVGHAYASTTAIYSHVSDEYRNRLLLRSLQARHGDLWEQET

SEQ ID NO: 4252 - protein, 107 aa, synthetic construct
  REGION 1..107: note = TnsF-Tn7 System Protein
MIRKMGIAWQLRIRMAEKGMFQTTDLVPLLAERGVHLSREQVFRLVTQTPQRLSMDTLAALCDILGCEPNDLIQVEVANAGERKAAGEQMQVRPQTRHTTIRRPGTA

SEQ ID NO: 4253 - protein, 762 aa, synthetic construct
  REGION 1..762: note = TnsF-Tn7 System Protein
MGTQWWTVEQVRDQLVAMIPGLAASTASQALTMTGTAQAAQRLRQLGAHLQTHPDTFASGHSDCPLAVVHLAHALRQIGADRIELPRCIRCRQPSDNLPATRPGGRICLACYRQERRGPCARCGRHTRADHRRDEGLICRPCRDAEPQSRGPCTRCGYERPLRTTARLCDSCIPRPLHTCGKCGNLAPAAAQTPAGPLCARCHQDPAVACGNCGKVRPTTLKATAEHPNLCNSCVPRKTGTCHGCGRHTFGNRTDRGRGAFLCQTCQPKRNHPCYRCGEQAPAKALWPAGPVCARCYRTVKQNPAECATCGQVRVLIAGHVGSAATCGLCAGADIDYLCLTCGEGRPPARFGSCDRCVLDQEITDIYGSGDAVAEHLRPLVHALRTSRRPATTWPWLQRSATARMLIDLTTGQSPPTHEQLDEITDLQRAHFVRHLLMATTVLPQRNEYLDRIPHWLKSVLAHRPAHQVKTVEPYVHWFLLRRARRRASGNNRTTSKTANHLRSHILITLEFLDWLDEHGLNLATATQADIDTWLTSGNPHRRHSIRGFIIWARRHHLAAGVHVADRFFRRHQFQPLADDELQQQLHRCLNDTRLPLDVRAAGALIILFGLTPARTSRLTTTDIIAVDDERYLALGPAPARLPSAIANIIDELIRQPVTFKTLTTPSEHTYLFPGRAAGQPIGPPSLKRRLQNHGLTPQPARHAAMLALTGDLPPAVAADLLGLSVKTTLDWANHAGSDWAHYIEARAADLARNTSTQDGTE

SEQ ID NO: 4254 - protein, 762 aa, synthetic construct; identical to SEQ ID NO: 4253
  REGION 1..762: note = TnsF-Tn7 System Protein

SEQ ID NO: 4255 - protein, 795 aa, synthetic construct
  REGION 1..795: note = TnsF-Tn7 System Protein
MLIYDVALWLCGHPWTALPVVPAAAAVAVLARTRLLAWRHRRLTSGAKLITVAVPPQVDAAGAATFWTTAAGLLRVGGWRRHLYGTPHLALEYVWFGRALTIRIWTPGTLAAQLVETAARAAWPAATTTTTDAHPPLPAGHPTAGAALRPARPDVLPIRTDHDTDPLRPLLALGATLHSSQHLAVQVLARPATGRRTTYAATAPTRMRQPATGSSLGDPAALLRFILDLFLPGNTRTGRPDTAARRADPVADRDAKAALDKTGYPLWETAIRYAVTDTTSRAGTDPTPRLRTLVKGVTAAFNAYTDRNRLRAMRLPDPQPVLAARAMRRGFLTSTPELAALAGLPLDIAVPGLQRARAKAVPAPVDVPTGGRHVKPLGRAEAGGHGVGLPVADARQHLHVLGSTGSGKSTLLANLVLDDIAARRGVVVIDPKGDLVNDLLERIPATAADRLVLIDPDQEHTPALNPLQGDDHDLAVDNIVSIFAKIFQRHWGPRIDDVLRVSCHTLLRHAGANLTLIPPLLQDKQFRARFTHDLDDPEGLRGFWDWYETTPPPLRAQVIGPVLARLRSFLLRDFVRRTLGTPVSSFDMGDILDGGILLARLPKGTLGEETTRLLGSFVLASTWQAATARSRLPEAQRRDATIVIDEAHNFLTLPRSVDDMLAEARGYRLSMILAHQHLAQLPKETLAALSANARNKVFFACAPEDAKTLARHTVPHLDEHDLHSLDAYTAATRLVISSRETAAFTLKTRPLPPPVGESTALRAAAARRFAERPDRLRGVSAMARTTARTGRTDPP

SEQ ID NO: 4256 - protein, 795 aa, synthetic construct; identical to SEQ ID NO: 4255
  REGION 1..795: note = TnsF-Tn7 System Protein

SEQ ID NO: 4257 - protein, 183 aa, synthetic construct
  REGION 1..183: note = TnsF-Tn7 System Protein
MKTVLITGVSAAGKSALARWLVEHGHQAVSLDGYLGLCDWVDDHGRGVPWPTDPDRSWLTRHRWVWRREVLDAVIAAAADSGAQVLFLCGRADNAAELADRFDAVIGLFVDSPTMTARLDEPSRSNPYGRMGDSRRFVLDNLDDDQRVLSGWVDAIIDARAPLPEVGEDVLSAAALELLRANG

SEQ ID NO: 4258 - protein, 183 aa, synthetic construct; identical to SEQ ID NO: 4257
  REGION 1..183: note = TnsF-Tn7 System Protein

SEQ ID NO: 4259 - protein, 372 aa, synthetic construct
  REGION 1..372: note = TnsF-Tn7 System Protein
MGQLDVLAGSAQSVMPAGLAYLDAQQAVFDGMLEGWSRQQRTRFLQLETIAPRLLLVRRLVAFGNLYPWQWTPGEMEAFFDHLRSGHRPIAYSTARGYQVTLRMFNEYVVDPRYGWSQICVDKFGVRPELVFNEWNTITHLSEAEGDPRRRSLSYDEVQALFDAADGLVEQIRGRGRKGALSAQRDAALLKVIYAFGLRRREAVMLDVNDLGRNPKMAQYGKYGAIRVRFAKAAGGGPPRRRTVLTLPEMDWVVAVLTDWFTEVRALFSPGSHPALWVTERCGRMSTRSVEHAFNRAQAAAGLDPALDLHCLRHSYITHLAEFDYPHQFIQAQAGHRYSSSTGIYTHVSDEYRNRLLDRTLHSRHPALAAAS

SEQ ID NO: 4260 - protein, 261 aa, synthetic construct
  REGION 1..261: note = TnsF-Tn7 System Protein
MTRHRGLTEQAADAAIDSACRLLRLPTIRGQFPELAEAAVRSQMTYRGFLAELLMAECDDRARRRSERRIKAAAFPRDKSLRAFDFDANGTVDPATIHTLATCDWVKKGMPLCLIGDSGTGKSHLLIALGTEAAMAGYRVRYVLATKLVNELVEAADDKMLAKTIARYGRVDLLCIDELGYMELDKRGAELLFQVLTEREEKASVAIASNEAFSGWTKTFTDPRLCAAIVDRLTFGGNIIETGTDSYRLAQTRNQLASSNP

SEQ ID NO: 4261 - protein, 261 aa, synthetic construct; identical to SEQ ID NO: 4260
  REGION 1..261: note = TnsF-Tn7 System Protein

SEQ ID NO: 4262 - protein, 106 aa, synthetic construct
  REGION 1..106: note = TnsF-Tn7 System Protein
MITKMGIEWNLRRLMAARGMFATADLVPLLAERGVHLSREQVFRLVTQPPQRLSMDVLAAVCDALSCTPNDLIEVRVVNEQSRRVADGAVGRPAVRRSTIRRPEGM

SEQ ID NO: 4263 - protein, 477 aa, synthetic construct
  REGION 1..477: note = TnsF-Tn7 System Protein
MSQCDECGRSVDKIHRFYKKNNFCHTCYIRVFKKRDCPSCGKLARLYKYDPSAICQKCENNRPCIRCQRIDYPIGKMTEHGPVCNSCSVYFREFQACERCGTLSQKLSRISRFADNLRICPKCATRDHRTCPSCSRYRLLEFEPLSGQMYCKKCLTFPPHPCLSCKQEISAGRGNYCEICSWHRALERKTTKLMSDLEDFNLQTYFKNYTEWLEQRLGAHKTALLISKHIYFFQEISDLWIKQVPSYTVLLQRLRPSGIRKYLLPMQWLSTVHNLQIDIQAKEYCSEIDQLNKLLNSCSESLFSSQILQDYYKVLIKRVDDGKISIRSARLAMKPAAALMFQVSKSRFDMPQEWHIKHYLSEHPGQAASLVGFIVFLKKSYSVNLSYSFIKNSNFLKEARNHKLEREILKLIRAPEESFDLLRWVKVCLKYFHKLNAVHCMEIQLSMINDIDEGLVINFRKENYWIPKRSIFVAYKG

SEQ ID NO: 4264 - protein, 477 aa, synthetic construct; identical to SEQ ID NO: 4263
  REGION 1..477: note = TnsF-Tn7 System Protein

SEQ ID NO: 4265 - protein, 229 aa, synthetic construct
  REGION 1..229: note = TnsF-Tn7 System Protein
MYNQSCDTVKIIPARRKIGNTRISVSGLYPFKKDSAVAFESTLERDFLIRLEVNPNVLAVESQPFTIEYFDDGKKRVYTPDFLVTYKHDNFLPFIPPKLVEIKPIEELRINLHLWKARYRAAMLICKEEGWKFHIAHEGRIRDQLWMNAMFLQKYRKMEFSLTDSKHLLNYVQDRGAVTFETLLSRHFLGKWERANGISQIWYLVAHGFLACDLSLPLQPSTELWISGN

SEQ ID NO: 4266 - protein, 629 aa, synthetic construct
  REGION 1..629: note = TnsF-Tn7 System Protein
MNDRRVNIKIAAGEPVQVKGIPHTIIEIIDLKSVFVENKNTGRKSIAAISELQAALPNEKYEDIDLIPDKDWAEAERRFNIIRPFIEDGVSGRKEVELRAKQHDINPATLYRWLKIYNAYGTIDGLRPRKEGLPQGQKMINKHAEAIIEKAIKDLYLTNQRISVQKVVLEVKRLCHEYHILDVPHANTVRNRIAAISQREVLRKRGHKEKANNRFTPAAGKFPHADYPLAVVQIDHTPVDLILVDDFNRQPIGRPYLTLAIDVFSRVVVGYYLSLDAPSVMSIAMCVAQAVLPKEKWLALRKIQTEWPVWGIMNTIHVDNGPEFHSETFRNACMAHDIRLEYRPVKKPRFGGHIERLMGTFATDIHAVPGTTFSNIFQRKDYNSDTEAVFTFTEFEDWLVDFICNVYHKRKHSALGTSPLHAFELGIFGDKNTLGSGAARLPANDHNFFLDFLPSFERTIQTTGVTIDGLSYYADVLRGWINSTEPDNHKEKRKFIFRRDPRNISEIWFFDPEIKNYFKVPLADQSIPSFSIWEYKKIQELKKETGEYLKDHELGQALAQLRERVQEASTKTRRARRAYQRSTQHQQRSNPASIQDKKSQQESTVMEQKLESLYGLLPLDELENDEDIS

SEQ ID NO: 4267 - protein, 361 aa, synthetic construct
  REGION 1..361: note = TnsF-Tn7 System Protein
MVSTVEPYSWAIRTPLFQDEALSSWLIRAALGCGCDPLSLTGVLWPGWRVWTVDIDKGLHQKYSKILSSKASISQDQLNTATFKNLFLQNSEIELNSWILALGTRNRKHKGGWQYCSECLLEDPIAYFRLNWRCVWQVGCIKHTQRLLDQCPHCYSAIQPRLLEAPDRIISCCSVCKKYLFNVKVNAIDQSALKFQKDFDLFLAQGYAIYADTFISLSEWLNVVQLFNQFIRKVLIGSLESKGWAFLNTLDIRVPHIPLISTGLVLNQLSVLERERIFSCIYQLLKVSREKFIKTANSLNMNRASFWDKRYQLPEILQPIEKHLDKVSRNYPLIKASPDISKPSSKEAVLRRVMRLKRKIT

SEQ ID NO: 4268 - protein, 283 aa, synthetic construct
  REGION 1..283: note = TnsF-Tn7 System Protein
MSNYPHIFQEFRPIVDQSNEERLYFLEEDRWIGYPAANDLLDQLKGMLTLPKRSRMPNLLVLSKPNNGKTSIINQFFKLYGEGYTNEFNNAVKPVIVVQAPVSPDEKALYMAILDRFWEPFRERDPVAKLRYQVVHCLKLYEVKLLIIDEMNSLLCGTPIKQRTVMNAIKYLCNETQIPIVGFGTEEAVRVLYTDPQHVSRFRVVNLPLWQLDKDFQVIVNKFEKVLPLKQPSRLAEPATVKYLHDITEGNLGNLRSLLREAAKKAIITGQEYIDHQLLESLK

SEQ ID NO: 4269 - protein, 283 aa, synthetic construct; identical to SEQ ID NO: 4268
  REGION 1..283: note = TnsF-Tn7 System Protein

SEQ ID NO: 4270 - protein, 479 aa, synthetic construct
  REGION 1..479: note = TnsF-Tn7 System Protein
MSHPVITPSAGTMCDECGKTAPKIWRVYKGHKYCGTCYAREFKRAMCPRCGNYAKLPRRHPEAVCSDCEKDKPCARCGRPPKYPIGKITEYGPVCNACSPYFSKVESCEACCTASQRLSRISRLGHDLRVCPKCASAAKAICTACRKHRVLLEAPDGRMLCKKCLELGQIPCPQCQALMPAGMGAQCDQCQWDKSFRKKLNIDLAAFSTPGMAAAFAEFGDWLSKEVGSRKAAITIHRYLPFFLEIEKQWKDIPDYPALLKHFSAEGLRRVRLPMKWLKKARGIMPDAQLREDDSDLRRIEAILASVPEGIAAGTALRKYHRMLQARLNAGETSIRSIRLALRPAASLLLESDPGGSKLPDQAGLLRYLHMSAGQRAAVTGFVNFLNTEFELSLLLPKAKKGASSEQRKKLEAELLDLMRVGSQRSGIDRRWLSVGLAYFHGLPRRVGMEVQDEQVRAQGDGLVVEWRSRNFWLPSRPH

SEQ ID NO: 4271 - protein, 1344 aa, synthetic construct
  REGION 1..1344: note = TnsF-Tn7 System Protein
MPEANWGVFSKLPGAADENFEKLCRSLVRRHYGRFGRFKQLANQPGVEFHLQLTESCDLGAPPRWIGWQCKWYELANGQTLGATRRSKIIEGIKKTRNHVQGVTDWKLWTRHTLTKADQEWFFALEEESFPKLKLELLTATDIEDLLVGPGALLRETYFGELVLTPALLAEQHRLAAAPFKHRYQPEVHVVVGAEEKVLRRLGGQSAWESLKILSSALKRNCTDIASLAGQLKTELKAEVDSLLARAIGLADLLDSLHAVLGNGDFDAVQQLLTTIPSQPVRYDRLLSKLRGARSAGAPLASNLVADIHSASSTLLNLERSIGVGAVAVLAAAGEGKSELAVKVTQADGEFPGGVLLLGKNLHAGQGLDDLVSAFKISGRPAESFERLVEAVDAAGQRAGKRIPIVIDGLNEAEDPRNWRDEISRADELLKDFPYVLLVVTLRNEFAQMCLPEEFHQVEHKGFQDDPQTAIDKYFEYYKIDSTDADLPIEILQHPLTLRIFCEVANPRRQHIVGVEALPSSLASLFEAHFNKVAERVAELSPAAHRIYQNEVQDALLTIAGLLWEGNARIVEFQTARTAVRDVGRWDVSVIRALESEGVLVRTTSEEGGQGIAFAYDLMAGHMIARHLLARPSLAQWLQSDEGRTQFQFRKPGSHTFGYDVFEALVGLYPQRLDRRQLWQDLLDENLVMNALLLTAQSDPRHIGRETVERFARAMQESKRFAQIAFKRLRSTRAARAHPYDMDFLHGVLKAMSNTQRDLFWSEWVRERSEEVEVDFKFLSSRWKSGDLDEREIRRARWVMWTLTSTSRSLRDVATKILYEFAAKRPEEFFGLAVEAISVSDPYVPERMFAAAYGAALTTWSDINAVEMREALPRVARETYRAMFVPGATHPTWHALYQQYCLGIIAIARMVDPACLSEDEATHLLPPFSYLPNPFENMPQYDPAVIERAKRAAIRMDFGNYTIGRLIPGRSNYDDNNPEYQRVLPAILSRMLVLGYDPEQFEAVDRQMNSGPRMGGDKHKVDRYGKKYGWIAYFEMWGVRYAQGLLPEWRSARPSDADIDPTFPLEAASVNLQLPDLFGDQPTGTGDWVVEGPQPDYREILEIAEIDGLTGPWVVLDGFIEQNAPADDRQVFTFLRGVLVDSGEVDSLCTLFTGLEYPGNDAIPAVPEYYYTYAGEMPFSSIPGLPADDAQEGGRAEYMVAADRWPDNGVTVEIPVQKYNWENYHSVLNQGSGASLPSKRLCEASSLRYRANKWELHDAAGVASMYREVGEYGSQINGSFSYLRRDLLDSYLTQSGKALVWLMWGERGFHYRAAEAHNLYEYYVNHQHIHKRTHVYQTASSTQW

SEQ ID NO: 4272 - protein, 385 aa, synthetic construct
  REGION 1..385: note = TnsF-Tn7 System Protein
MGDTSELKNDLAQTIRLALAEQTEDARLFAARLVRKYRSTEPDLAEQIDLFLRSKPNRAGAPLRKAAMAPLPEQVLPVDDESRLSLLKSYRDFPERDAPLLSAHLEGALGQLIQERKQAVRLAALGLTPTRSAIFVGQPGVGKTLTARWLAAQLGVPLYVLDLTAVMSSLLGRSGSNLRAAMDFAKRGPCVLLLDEIDAIAKRRSDDADVGELKRLVTVILQEVDDWPATGLLLAATNHPELIDPALWRRFDLIVEFKTPEAAAVREAIKRFLGPDLALFERWIEILAFTFRGLSFSDIEREIQRFRRAVALGAKPVADLIEVFIKTRALSMDRQDRIDMAVLLAKETRLSQHSISEITGVSRDTIRKYTSQGSTVVPRRRRPEA

SEQ ID NO: 4273 - protein, 385 aa, synthetic construct; identical to SEQ ID NO: 4272
  REGION 1..385: note = TnsF-Tn7 System Protein

SEQ ID NO: 4274 - protein, 479 aa, synthetic construct; identical to SEQ ID NO: 4270
  REGION 1..479: note = TnsF-Tn7 System Protein

SEQ ID NO: 4275 - protein, 222 aa, synthetic construct
  REGION 1..222: note = TnsF-Tn7 System Protein
MLTQTRPIKPTRRSVSGVYSFRGETAVPYESTLERDFIIRKEFNQSVLDIIPQPCQIPFTTKNGRKHIYTPDFLVYYRLGNRAYPEFPKPVLVEVKPEVEWRKHWRDWLPKWKAAYRFAQEQGWEFHIQDESRIRDQTLSNIQFLDRYKRMSFPAEESRWVIKNLRAMGSAPVHFLLARHFMGIYQAQGLAHLWHLLATRQLDCDISMPLNDQTVLWVTTDE

SEQ ID NO: 4276 - protein, 639 aa, synthetic construct
  REGION 1..639: note = TnsF-Tn7 System Protein
MSNHAEDDIEMHEEDFAPIRQKVDIQVGNFVQAGGRIYRIEQVLDFQSVIGVEVESGRSSPLRIQDLRPVDHTPDASTIDLSEIADEDWKVAEQRFAAIHPLLNVGMLGRSMVAQRADEVGVDTATLYRWLQRYNAYGSTTALIPQKRGWKTGKGRIEVFAEEVIQEVIKDYYLTSQRSTAQKTITEVQRRCMARGITPPSPSTIRARLSRIPERERLRGRGYKERAKNKFLPAAGSFPNADFPLAVIQIDHTPADIILVDDVYRKPIGRPWITLAMDVHSRMVTGYYLSFDPPSETSVAMCVAHSMLPKEEWLLLHKVDAEWPVWGRPKTIHVDNGADFRSNNFQQSCLAYGIHLEFRPVKQPRYGGHIERMLGTLLREIHDLPGTTFSSVKHKEDYASEKHAAMTMSEFEEWLVTLICKVYHQRIHSSLGITPIKKLEIGVFGNSEVAGVGVPPRPADRLTILLDFLPSFKRTVQTFGVTIDGMTYYAEALRPWINAGDIENHGKKREFTFRRDPRDISSIWFYDPELKHYFKIPFADQSLPSMSIWEYRQAQELLKKQGAKSVDERQILGAITELRSKVEEAKEKTKKARRQAQRRVEHEKKISPAAPMPTPSPLPSPITPEGLIDGDIEFLGEIA

SEQ ID NO: 4277 - protein, 377 aa, synthetic construct
  REGION 1..377: note = TnsF-Tn7 System Protein
MGTTFSWHQGSVPVSPRWALMPALLPDELISSWLLRAAMRFGCDPKALCQQIWPSWRFWTTDPDRGFDDERLTSLMEASGVSANALQSASLRGIAERVIRQPRPDKMTWAWILTLGTRGNTRQGGLQYCPRCLGEDETPHYRLHWRFAWHVGCQEHACTLHDRCWQCGAPLEPHRLVPEDGDIATCGRCKADLRAAPSAGVIEDAIAFQHMADHTLHTGHGMVLGEEAEAPDWFEVAHFITGLIRNAYRSMGHNALSDLIIEVSGLNPQSLPIQPGMSLERLSNRDRQWVLAIINRFMMMPRDDLVQALRHTGVSRQAFCPKHVTTPPLIVDLASGVPATTKHDKTTKSPRTTGPRPRHEVVRMMNRLMRKLERERQ

SEQ ID NO: 4278 - protein, 296 aa, synthetic construct
  REGION 1..296: note = TnsF-Tn7 System Protein
MMNLDHIHPDFRHVMGLSDKERLAFLDQPRWIPYPLAERVLDTLRGLMEKPHRPRMPNLLIVGDPNNGKTTIVRRFQELHGQGYVSEEGDPVKPVILAEAPPSADEKSLYISILERFFTPYRPTDSTARLRYQVIHLLRLCNTRILIIDEFHSLLTGSAIKQREVMNAIKLMCNELAIPIVGVGTREAVRVLHTDPQHASRFDVVALPTWELNQDFQRLLAGFEKILPLQKPSKLHQPELATRLHTISGGNLGDLHRLLIACATDAIHQGREQIDKSIIENNAWVRPSRGIREVSL

SEQ ID NO: 4279 - protein, 296 aa, synthetic construct; identical to SEQ ID NO: 4278
  REGION 1..296: note = TnsF-Tn7 System Protein

SEQ ID NO: 4280 - protein, 481 aa, synthetic construct
  REGION 1..481: note = TnsF-Tn7 System Protein
MTSHDTSHHLACDGCGREMAKAKRVHAGKRYCGTCYPRLFKRRMCFGCGDFARLPVHDPAARCLPCERSGPCIRCGKAEFDTGLRTEHGPVCKPCTPHFRIAEHCEVCGKLSQRLARSRATGLRQCPVCSGPERATCPSCRRHRVLITGEDGVGRCEPCTSKPDHPCASCGTLVPAGRGRECEECGWKNLLQRRLNINSKGFTTDRITALYIQFCEWLLDRSGAHKAALSINGHYHFFQALDATWGEVPSYEQLLQHFAAQGLRKAETPMRFLTETGVVTVSTQLRDQETERRRLEAILAEPADSWSAQLLGEYVATLSAKNERGGIDLRSIRLAARPAANLLKSAQVKPGAFPTQKNLESFWRGSPGQVAAVTGFIGHLNRRHGLELQVKPDVRWLANARRQKAERDLVAMLDETADESFEARWIVKGLAYFHDLPRVSRKSLVFEPQEYQGVEGYQVIHEDKPLWVPSASSYQRGDRPA

SEQ ID NO: 4281 - protein, 261 aa, synthetic construct
  REGION 1..261: note = TnsF-Tn7 System Protein
MGESDLNFVSGRIKPITVGIVGPESAGKTTLLGAFYLLLGQGALTTETNVFSNSYTLAGWEAVATYLRWKPGHPPSFPPHTPSGAARAPGMLHLGFRREDGSLRDLLFADAPGEWFQKWAINEQAADAEGARWIARHADVTLLIADRQALSGSKMGTARNDFQLLAQRAIAESRGRRLALVWTKGDVDVAEAMEAQIRKAVASHSSSVPEFTVSVSASAQVDAAEGFRKVFDWIICTKRAGLELPMTEVGGHDPLFRFGRR

SEQ ID NO: 4282 - protein, 261 aa, synthetic construct; identical to SEQ ID NO: 4281
  REGION 1..261: note = TnsF-Tn7 System Protein

SEQ ID NO: 4283 - protein, 577 aa, synthetic construct
  REGION 1..577: note = TnsF-Tn7 System Protein
MAERLQRIDLSYYRPNLRHIDSQVKMLQGDQLVWWYGPVRQNPRLRSVPLVKVHFRQLFNDEPGPRTSAIVPLSSLPHYRKGTIWRDGLCVCDTTLASEPEDFDVDFDQDGWSVTSRAELVQQTNAQVFHHDEYPLQYQLDRTRLLSFKLPQKGKNLLIPCTEYFIRAYARNMEVCRALATLRWSDAMSVFFDDPNPDAYSWLVKPSRKMRLYDAVFLAHLLYDKYAAHRIRQINSQFISQGPSSQIFLEASPWFKGKGTLRCRGRWINGGNTFLCLNLIGSSQPDGGEIEWVTKKTDSSEGKDGGQYVLPRPVRTAEAEEFLNEHSHLAPDGHSETIIVKPPPFKVLGTKRTIIKKKEVIKTDRGRLGPHPPNADSLSSGDGTGAGKNVGKAEHGAEAELETQGFLYDIWNAFRSIMADNPGRVTKVNWYTPPKFRDQGPLRAIRLQPAADWDPRDVSAANWVYLDKKTGELRGLLVLRIEVDGQNYFCFEIQPIKPEKPEYRGVLMRSHISTVEEFDEFIQQLCSRVRRVAGQFKKMESFFPPGTKIFKHHQKDTKVLYRSRLINAFADVGVALQ

SEQ ID NO: 4284 - protein, 481 aa, synthetic construct; identical to SEQ ID NO: 4280
  REGION 1..481: note = TnsF-Tn7 System Protein

SEQ ID NO: 4285 - protein, 173 aa, synthetic construct
  REGION 1..173: note = TnsF-Tn7 System Protein
MIAQPVQVDFIDSLGRAQTYTPDFLVHHRQPEGVDYMDYFKPMLVEVKPAYEWRKNWRTWLGKWKAARRYARQEGWTFSIYDESRIRGLPLDNITFLERFERLDFDREEIEMVLKTLREMEFAPVHYLLARHFRGVYRDSGVALLWHLIATGRVECDITEPLNEYLELWVATP

SEQ ID NO: 4286 - protein, 640 aa, synthetic construct
  REGION 1..640: note = TnsF-Tn7 System Protein
MNIYEIDTDKHLEPFEPSRERVRVEVGEMVRCDKQYYRIVQLLDFQNVVGVEVEAGRSVSLRISELQPVEQERVDGLYVNYDISTISSDEWAIAQQRFSAIKPLLRDSALPRNSVEDRAKEVGVDTATLYRWLDRYQSWNEVLALVPRKRGWQSGNSRLSAQADKLIDQVIDQHYLTIQRRSVQSTIKEIESQAKALGITPPSASAIRARIKRIPEKIVLRRRGYADQARNRHTPSVGKFPGADYPLAVVQIDHTPIDLIIVDDRHRKPIGRLWLSLAIDVHSRMITGYYLALEDPSEISVGMCLAHSILPKEAWLNLHNVQGEWPVWGFPRVVHTDNGPDFQAENFRRSCANYNIENQFRPVKRPKYGGHIERLLGTFMRALHELPGTTHSNVPDRDGYDSDKHAALTMGEFEEWLVKTIILYHNDIHSAIYMSPARKWHLGFFGSRGVDALVSIPPRPADQLTVQLDFMPSYRRTVQHYGVQLDVYYYSEALRHWIGTTDPETGQARKFVFRRDPRDISVIWFYDPVLKQYFRVPVANQAFPAATLWEFRAAKKQAVDEGRQHVDEALIGRLILERRQIVDAASASTKKARRDAQKHKVHSKNTTPARPVKAPVEAVPFIPTGEGLLLDDVDLIGDIQ

SEQ ID NO: 4287 - protein, 246 aa, synthetic construct
  REGION 1..246: note = TnsF-Tn7 System Protein
MNREAIEQAYELKRFIQAAIDAGTIQNREQLMTVATRHGLSVTRNGDDYAGFKLESGKRLRVHFQFNDRPPKAPRAKGRRERKVTTGYWIYALVAQSKDGTRKACYVGQAADLRKRFFEHLHRQREGCCSYALFRWAAREQVDIQATVLTRAEGTQSNATHYEGYWLQRAQNAGYETPDDDKWGRLPRPECLPGQPLHWPAAQVQAHAISLIEVVMHKLTPRVLYREESMDVEDQAKPAKEPFSAG

SEQ ID NO: 4288 - protein, 296 aa, synthetic construct
  REGION 1..296: note = TnsF-Tn7 System Protein
MTGLRVQDLLASTLLPIIRLLHPNPVVLRSSQLPWILPLGCRNRSHAGGLLCCPVCIMDPQPYFRQQYRLAWHTACPRHRALLIDRCPCCYSALQPGRIAAEHPLSNCHHCGCSLGSSSSEAAIESALAFQTFVDTASHSTAAYGGVSLSFSEWMSIARVMISFLKKATRHPTVTALRFCKAIGVDTSQLKSSSLGLPFEYATPAERAGLLGQAWVIMQAGPERFMELAADAELPVTAFPLPALGVPEIFKQMATAFSQHPPHKRGRSGPSHTRAPLEVWHMWNRLQRRMRRHDIS

SEQ ID NO: 4289 - protein, 296 aa, synthetic construct
  REGION 1..296: note = TnsF-Tn7 System Protein
MTEYAHLHADFRPVLQLSARERIRFLGEPRWIGYQAAHHILDSLECLLEAPKRPRMPNLLVVGDSNNGKTTIVRHFENTHGKGYVDENAEPVRPVILAEAPSSADEKELYVAILDQMWMPYKTTDSKLTLRFQVIHALRELKVKMLIIDELHSMLTGSAMKQREVMNALKLLCNTLAIPIVGVGTTEAVQILHLDPQHASRFEVIKLETWKLNADFQRLLKAFEAVLPLKLPSELYKPELAQLIHSISGGNTGDLHGLLIECAKEAINSGKECIDRQLIESKSWKRPTRGIRERIA

SEQ ID NO: 4290 - protein, 296 aa, synthetic construct; identical to SEQ ID NO: 4289
  REGION 1..296: note = TnsF-Tn7 System Protein

SEQ ID NO: 4291 - protein, 278 aa, synthetic construct
  REGION 1..278: note = TnsF-Tn7 System Protein
MAAQHTILLVGESNVGKTHYGAQFLKRLMVKSCELEMTRAPTNLEAFTTALSCLTEGKATDHTPANIYVESVWPITDQTGRRAELVWPDYGGEQIRSLVTQRRIPDAWRERVVEATDWVVLIRLHSLRSEEDLFSRPLQSFATVEPQGEAAAHELSDQARTIELLQMLLYLAQFNLDRPLCRPRLTILLSCWDELDTTEIPSDLLASRLPMLWSFVRSNWASPTVFGLSALERALSKTDADPDYAIRGPEEFGYVVLPNGVKNTDITLPIQQLMAEGR

SEQ ID NO: 4292 - protein, 278 aa, synthetic construct; identical to SEQ ID NO: 4291
  REGION 1..278: note = TnsF-Tn7 System Protein

SEQ ID NO: 4293 - protein, 492 aa, synthetic construct
  REGION 1..492: note = TnsF-Tn7 System Protein
MTPPELPLQCDECQCIATKIHRLHKGRRYCNTCYARLFRRRLCSSCGNFGRLPVFETDAKCIRCESKAPCVRCNKTGKPVGLMTLYGPACTSCAHHFSQPEPCERCGKLSTKLTRVLAIDPDVRCCPQCAREGAATCPDCRHHRFLVECDDGRRRCKLCAAKGEVRCATCAQMMPAGRKNECENCAWGKSFDRRAGIHVETFDNASTRQRFDEFCQWLKNDMGAHKAALKLKHYVSFFSFLDAHPVGLPSYAFLLEHFSAEGLRRMQTPMLWLNTRFGVAADEQLRKEHSEKRRIQEMIDSTPAGAGLDALLGYWAYLRTKQADGGTSISSIRLSLRAAKNVLVSASQLFDTLPTQKTVMAYLTQTPGQRAAAQGFIGYLNRTHSLSLKIELSERAVARAKNQKLEAKLYGLYSTAGEGEAFERTWIKTTLMLLHKVKSVNKKALNYEAMTMQGVAGFNVELNTKVYWVPGPTSAPAFASETTLRPADDVNA

SEQ ID NO: 4294 - protein, 579 aa, synthetic construct
  REGION 1..579: note = TnsF-Tn7 System Protein
MFQRIKRVPPRNNLCTTNDGEAIEHIHNGTVVVWSYERIRKNFSAESIPSVDVIFRFLDRNDEPAGVTEARIGVSRLGSFRLGTIWQGGKCIAETDLGKDIEFSVDFTAGTWSFISIQGNHQPVPYFKIDYPLRSQPTDKVLTEFLSFPLSNEKNLLVPCIEFLYRCYGSTSDMARILTTYSWPKVLDLLYADTTKDPHTWLVQPKPDVPNDDGLFLAYVLYDEYAANAAKRIYAELDNAHGKRMKEASLRVSPWFQGPAKLKVRGRWINNGNTFLCYEITGMSQPQDHPYEIRRVRYSKEDTEQDENLINTIRIKVDASKPIDPFAITDRLEPDQGSARWSKPDPVFQILGQECPHTVSFEERSLVKKNVTLIPSQAAKVLSTGDQQGYNKGVSKITAVAKRVLGNGGALQEVWDGLQNWKDRNRLSSLAWLSERQGFVESADFRLLALAPFAKSETPENTNRTWLAYRENAIRRRGILVVRAIVGRRSFYLFELQRKKVRKGTVYCEENISGLLIEINNEDEALVEISRIRSEIRFTNGNFRRLKTPFKHRHNIFRHHPDVGTTLFYAFYHLGVTFR

SEQ ID NO: 4295 - protein, 492 aa, synthetic construct; identical to SEQ ID NO: 4293
  REGION 1..492: note = TnsF-Tn7 System Protein

SEQ ID NO: 4296 - protein, 183 aa, synthetic construct
  REGION 1..183: note = TnsF-Tn7 System Protein
MLERDFLSRMDFRKDVLTVLSQPVQLDFVARSGRSYTYTPDYLVHFHAHTHQRPMLVEVKPAENWRENWRDLLPKWKAALRYAKGRGWDFHVYDESRIRGQSLKNIQYLERFRNADYADQDLDAIIRTVAFKGIATISYLLALHFQGEEALGKSHIFHLIATRQLDCDISGPLSDSLEVMVAE

SEQ ID NO: 4297 - protein, 639 aa, synthetic construct
  REGION 1..639: note = TnsF-Tn7 System Protein
MIENLSGQLHSGKIDRTFVNIAPGEVACYQKEVFRITQVLDFQSVLAVNVESGQPKVIQIGELKPFLGDKIKGPYADYDLEDIGAEEWAIAQKRYAVIAPLLGIDGQSRSVVEQRAKDAGVDAVTVYRWLRRYKEQGEVTALIPLKRGWGKGRSRISEGVEKVIAETIDDFYLTEQRPDVASTVYEVRKRCKALKLSPPTVSTVQARIKNIPDRTRLRRRGDKELAGNKYDPRPGGLSTEYPLQIVQIDHTPADMIIVDDVHRRPIGRPWLTLAICVYSRMVTGYYLSMDAPSAVSVAMCVVHSILPKEKWLALHGVDAEWPVWGKMGTLHSDNGADFKTNSLVQSCVNHNIRRDFRPKKNPQWGGHIERWMGTFAGINKKDRGATFSNPAERRGYDSEKQSIYTFAEYERRLVKNLIKYNNQFHEEIDMAPIKKWNLAFFGDKEHDPIVPLPPRVADPWGFQLDFLPSTLRTIHPYGVEMDAMYFAEALRPWIGATDPKTGKARKFLFRRDPRDINRIWFYDPALKEHFEVPIIRGRYAGVTVGEYVNAKKKARKAGRDAVNHDVIERMLDENKQQETEAALRTKQARKSAQKRTNNTKQTTPARPTPNVELKFPPTGLPESPQLLSVDEVDTFGEVW

SEQ ID NO: 4298 - protein, 372 aa, synthetic construct
  REGION 1..372: note = TnsF-Tn7 System Protein
MDASYQCRWGAGASPVNPVWPLVPSLLPDEVISSWLMRCALAQGCDATTLTGEVWPRLRFWCRDPDRELSIEQALHLNRLSGIPAAALQAATLQPLHQMMTGSPNFPRGIAPWFLCLGCRNRRRCGGLQYCPKCFREHLPHYLIQDRLSWHSACPVHQAILLDRCQNCQAPLCPQLLAPPEETLGRCHRCGYELCFAATVPVPDKALLFQHATDGLFSRPALSYGGQHLPLVEWLALSRWMIGILRTAARAPSPCTETFFRELGVNLGELKPPPTGLPFEYLSPVDRASLLANVWSMLEINPERLMEVAEREHIRPSLLLPRSENLPSSLVGLAAVLKSRRCRKNSLSPIDNPRSVKSVLMRWQRLLRKFQR

SEQ ID NO: 4299 - protein, 297 aa, synthetic construct
  REGION 1..297: note = TnsF-Tn7 System Protein
MTDYAHITPQFRDVMQKSDLDRLAFLDEPRWVDYQAAKNLMDILNGLLRKPERPRMPNLMIVGESNTGKTTVVTRFKELSGQPYISDDAVSVRPVICAEVHKPDERELYNAILREFWAPHNPVAPLEKLRHQAIHLLRDARTRMLILDEVHTINNGSAAKRMDVMNELKMLSNILHIPLVLVGTRTALQLLVLDSQYSSRFEVVSLPNWSVNAEFQRFLKSFESVLPLKFASKLYSPELTPLIHAISNGNTGNIEYLLRECAREAIRNGSEVIDRRLLEKNQWMRPTSADGVRERVL

SEQ ID NO: 4300 - protein, 297 aa, synthetic construct; identical to SEQ ID NO: 4299
  REGION 1..297: note = TnsF-Tn7 System Protein

SEQ ID NO: 4301 - protein, 287 aa, synthetic construct
  REGION 1..287: note = TnsF-Tn7 System Protein
MDYLSLLLNEEFQRIFNEFSQWLVARKGMDYAAIKIGYYFKFLHELNNLANRLNAFPGYYDIVNNLTVATTRQYLLVTVFLSETKAIKIDSKIKDEFSNLDMIDRYLNHFEQNSIFSQMMNSYYGKLEFKLEDGKTSVRSIRLALTPAINFLKNCIYFGFSQPSQQVLQGFLWASPGQRAAITGFINFLRNSYGTNITLDSIPKIVALERPYLSTKMLKQRFIDILRESKEREIPDEKLLRTSIAYLHGVEIPEFVRLCRDDILKNKAGEYYLRLANENFYIIQSLK

SEQ ID NO: 4302 - protein, 242 aa, synthetic construct
  REGION 1..242: note = TnsF-Tn7 System Protein
MKPSPDLEPVIEFKQITKRFGQGESAFDALKGVNFKIYNGEFVAIMGPSGSGKSTVMNLLGCLDTPTNGHYLFKGLPIETLNRDERALLRRNHLGFVFQGFNLLGRTSAIENVELPLIYRGVPSKQRRLLAEKSLERVGLKGWEDHSPGQLSGGQQQRVAIARALVTDPQILLADEPTGNLDTERSHEIMKLLSELNSETGITVLMVTHEPDMAEYASRLIHFVDGDVESDQQQAAKLGESQ

SEQ ID NO: 4303 - protein, 242 aa, synthetic construct; identical to SEQ ID NO: 4302
  REGION 1..242: note = TnsF-Tn7 System Protein

SEQ ID NO: 4304 - protein, 607 aa, synthetic construct
  REGION 1..607: note = TnsF-Tn7 System Protein
MTDFPCTACTEEMGAYRARKGYQLCRKCYYKQTEHLTCSKCGRLTRILPTANPKLCGRCINAALYEGKTCKRCGRETLPHKRTTYADGTLACSACAVQLAPPKECHYCKKVSIRVWRDLKLGFTEPACPQCRSTRNTTPLCAGCRRPRNAEGFRDGKPYCKDCLPTGHPPVIVCVTCGKTKYGFSKTQCEDCAWEASHLRLLHTLKPQLQSVWARALFESYHYEARIKTLRGPWRNALKRDIAAFQDLESVFSSAEELSGVLIVRRLGHQFSKKYRRVMSFLSYMGYVVLDDDPDFGLELAISRIRALSTDDVPWIQAVTQDFIGYLLETRKKANVQRRTQRLVRMAKSIESAVRTAIRLLRYCANNHGAESVQDITQEMFEMALADKLHSFASGAFLRYHHKRKLSFHKLHRVKVPAPPIPTHLVYSEEERNHFLSLFQATNDPRKNHWALIAQLNLIYAQTIFDLVQLERSNVREADEGYEIRFSKVFIPLDESIVPSMQRWMTQRRERGAFDEQNTSRYLFPGTRSGTHIQSTAFQNYRNLHGYDARRGRVTAMANLVLGGIANPRILQDLFGISQSRGHMYIEQLGASQQRVAGHVMRRYGHQ

SEQ ID NO: 4305 - protein, 369 aa, synthetic construct
  REGION 1..369: note = TnsF-Tn7 System Protein
MTRMPGLDLLRAIAIVWVMLFHSFIVGGLGDDWSWLSKYGWMGVDIFFVLSGYLIGSQVLQRLRDHGRLGFGDFYLRRAFRILPAFWVVLAIYVLLPSWREVDGMEPWWKFAAFIYNLDVDYNAHAAFSHAWSLCVEEHFYLLFPLLAMGLFRRNSTLLVIATIAFVLLGGIALRSAIWLHDDALKPDRNWFIEDLYYPTWCRLDGLLVGVALAAMKVFRPQWWLRLRSQANVALLIGLVGVVVSFWLHAQRDGLLANSIGWPLLALSFGLLVFAAAERDSWIGRWHAPGAGWIAAISYSLYLSHKLVMHGVSVMIDGRVHGFAAFMLYALAILAAGALLHVAAERPGLRLREFMLMKLRTTPEFRMIQ

SEQ ID NO: 4306 - protein, 216 aa, synthetic construct
  REGION 1..216: note = TnsF-Tn7 System Protein
MARPFLYVLAGVNGAGKSSLGGHALRQIGIEWFNPDTFARDLREATGSPPEDANAAAWHEGVRQLDAAIANGTSYAFETTLGGNTIARKLREASATHDVLMWFCGLDSPEHHVERVRLRVSRGGHDIPETKIRERYVSSIANLTALLPQLAQLQVYDNSTDAAPGSPVADPRLLLQMEHGRITWPTHARALRDTPDWAKPILETALSQVESGASSR

SEQ ID NO: 4307 - protein, 216 aa, synthetic construct; identical to SEQ ID NO: 4306
  REGION 1..216: note = TnsF-Tn7 System Protein

SEQ ID NO: 4308 - protein, 403 aa, synthetic construct
  REGION 1..403: note = TnsF-Tn7 System Protein
MTATILPFGQAPLAQAANEVPVPTPEEAREERRRRARKAKQPTVLPLQRPPRDLTEAEMKLQTQMLDGYFVGHRGARRHTAKTVQRDRRHAEEFLAYAGQPIWACTSDDFESWCSHLSAERKLKSKTQRGMQTAVSTLYDYLVTNRNWQNQVHALCGERIEQVVTVENRIVHVTDDGEVTERYHMDAQELDAFFRMIDILIEIAGGERKRLLKTLQRDKAMFCTYYAYGLRLSEGHKLDMTSFRKNPDLPELGRYGFAGVYGKGSRGSGPKFRMAPPITPAIPSILDWYLEEIRPKFAVLPGHESAMWLSEVGKRLCRASIWGRYKFLIRTCGLDEKLFSTHGLRHMFASHQSEADVPMQFTSKSMGHVHGSTTARYTHLSDKFLRNVAVNVIRRDLYREDET

SEQ ID NO: 4309 - protein, 150 aa, synthetic construct
  REGION 1..150: note = TnsF-Tn7 System Protein
MSPARASVQWSLRNLLEQNAQFTIAELVRQIELDGDYPQTRKQVTRLLGQSPETVPILLIGSLCRILKCTPNDLFGWTPPDNVVDLNPGMTAFTAEARKRAVAGGVSDSVDLPDGIAPLDPNLRGKVVGPSMRAMAPHQAGRDPTKGETK

SEQ ID NO: 4310 - protein, 607 aa, synthetic construct; identical to SEQ ID NO: 4304
  REGION 1..607: note = TnsF-Tn7 System Protein

SEQ ID NO: 4311 - protein, 846 aa, synthetic construct
  REGION 1..846: note = TnsF-Tn7 System Protein
MAQSKADRYAAAVLADPRSVIIDIVRGADPALSVAVCVEAIAEVAAATATQRRLAQALFDAPALMVSREPLGPPVLDRLIAALQQRGSTRVALPLCGRCHRQRRLNARAGGLRICGSCDAYRRMSGQTCGRCGERRHAHYKDWDGGAVCRTCARADSGVDQHHRLMQRICAINPHADADLVSVVVGQTLPTPGHKRRVADELSAHPLRLSAEAAYATATTMGLLCALIDAHVDGFTMPRCPLCARSAPLTEVLDGRRCCRRCYDKGRAEPCAGCGGRYPVITRDSEGSPLCRTCYTRQPHNQAICPGCGEQAHLIRVGGGAPICRRCRRAPTALCAMCGKLRQCYFADTDHPRCQPCSAKLLLQQQCSRCGHVRVVRTRDRDGAPICNSCGRPRATCRDCGRTARVRGWLSDGPRCKRCYPRHPESFRPCQRCGSHERLHHFGLCPSCAVLDRLHAVLGDHTGIPARLEPVFTALARSSAHSTLIYLDHGGDALLRQLRQTGHQPITHQLLDGYHPNRALRPLRDAMVCAGVLEPLDENLHQLIGDLDRVVATISDAHDRRLLRAYTTWKLLRRLRTQSPSRPVTRGQAVHARRKLLTAAALVEFLHQRGRRLAGADQGDIDAWQITDPTAWVLHEFLTWAIRRGDARPGLVIAPRSKGPRSASIADDQRWALVRKLLHDNSIDRRHRFAGLLVLLYAQPVSRIAGLRTDALTQRLSDRTVCLALGSEPIVLPTPLAELALGLVLDRPDGRAALARVTDHDWLLPGLRAGSPITSAHLTHRLKHLGIPARAARTTTLMDLAAQLPAAVLAALLGIGITTATDWATEAGPATTYAADLLHRAHPPQQ

SEQ ID NO: 4312 - protein, 846 aa, synthetic construct; identical to SEQ ID NO: 4311
  REGION 1..846: note = TnsF-Tn7 System Protein

SEQ ID NO: 4313 - protein, 340 aa, synthetic construct
  REGION 1..340: note = TnsF-Tn7 System Protein
MLRGWERQLLGGRRLAPRTVRGYLSPVRRFWGFTAEYPWHWTAAHFDEWMVDLVVVHRRRKSTLRAYQGAVQDFCAYVTSPHYGWIAECENRFGTHPVQICHEWNTAAHLVDYEGGPDRRPMTREEIQLLLDYADGQVEQAVRLGRKGALTAYRDATVFKVLYGWGLRAREASKLDSTDCYRNPAAPQLGRFGQLHVRWGKASKGSPPRRRMVASTMPWAVEALEDYMVNIRPRFTDRADGPMFLTERGGRLQPREIDARFADYRDTLGLPGDLVPHCLRHSYVTHSIEDGADARFVQEQVGHRFASTTAIYTAVSGDFMNTMMRRALERAFTTEQEQLR

SEQ ID NO: 4314 - protein, 110 aa, synthetic construct
  REGION 1..110: note = TnsF-Tn7 System Protein
MTPRLDYQWHLRTVMATRGLFQTTDLRPLLAERGIALSASQVFRLVTERPERINVKILVALMDILDCRMEELIEPVAVRAQRQRRTGSGHDSGSVGDFRPKRARIAGTEP

SEQ ID NO: 4315 - protein, 370 aa, synthetic construct
  REGION 1..370: note = TnsF-Tn7 System Protein
MTLLNWLARKRPVTMLRRLADGDGPVTHEVLDQLGRSGPVRHLRQVLIAHKVLPDRDRNLDYLERWFDVKLSEIGDVDERRALRGFLTWTHIRRLRVADSPVSPYSAASIRNEVTSAIKLLDWLRARRRDLHTCTQADVDEWCLQGGSMPHRARGFVVWCVERGYMNGVVLAPRPAAGSRVVFDDQDMRWRIVRRLLHDDTLATADRVAGLLVLLYGQMVSRIVQLTVDDISESEGHVMLRLGKYPVIVPRPLDQLLLELVDTRKGKASLGHTDEHRWLFPGGLPGAALHPLAVSARLAKLGVPGRIGRNTALMENAATMPAAVLSDLLGLSVSGAVQWTIRAGGRGNTYAADVACCYAPDSPGRKTNGD

SEQ ID NO: 4316 - protein, 848 aa, synthetic construct
  REGION 1..848: note = TnsF-Tn7 System Protein
MGNRTVSGYAAAVLDDPLSIIHAAVQRADPTLAASVLSAALAEAAPSITVQRRLAQALFENPELLTDRQPLGPPAMDRLIKALQGHGSAGIELPLCGVCHRDVDLTNRQGPLRICGSCYTRERKRIESCTSCEKSMLTRYRDWEGRPLCAACEHRISEVDQLNRLVNQITIINAAVDTGLLREIVERELPKAGNQRRIADELAEHPLRLTTEAAHATAATTGLLRALVNADIGGFVMPPCPFCNRAVELTTVRERLRSCRRCYEQHHAHICAGCGAARPAASRNASGAPICRSCHNHQPENQDTCPGCGERARLYRLAGQQPRCRRCQRSPITICAFCGKLKECYFADTATPRCEPCSSKLLRREPCSICNQIRIVRTRTADGAPVCNNCGLPKALCHSCHRVMTVRAWLPDGPRCKACYRRHPDSFKPCRQCGKLEHLHHFGLCRGCACIAQLRTALGDDTNIIPRLQPIYDALARSSLESTLTYLEGGGSQLLGQLRETGRPVTHQLLDEYRNLPHTRPLRDALVCAGALAPRDEILHTLEEQLHRFLSDIDDEEDRKLLRNYATWRLLHQLRTKARRPLTRPQATYALLKLSIAADLLEYLRRHGRQPEEADQHDLDRWQMSNTQAHRARDFFQWATARRHFRRGLLLAPRPRHHGSGAMTDDERWKHARRLLHDTSIDRCDRFAGLLLLLFAQPSRRIVTLRTDAITQRIDNRAVSLALGTEPVVLPTLIGQLALDLVVNRYRGRAALAQTSDHDWLFPGVRAGSPMSSQNLNIRFNRVGISAQPARTAALMDLAAQMPAAVLAALLGIEVTTAQGWVTEVGQNGAYAADIARRHRPPSEQANP

SEQ ID NO: 4317 - protein, 340 aa, synthetic construct
  REGION 1..340: note = TnsF-Tn7 System Protein
MLRGWEQQLLGGRRMAQRTVRAYLGTVNRFSAFTDEYPWLWTAAHFDEWMAELVGARQRKKSTLRNYQGAVRDFCTYLTSPHYKWPEECENRFGTHPVQICHEWNTVGHLVDYEGDPDRRPLNRTELQQLLDYADDRVELAVKRGRKGALTAYRDATVLKVAYGWGLRAREVSRLDTTDCYRSPSAPELGSFGQLHVRWGKASRGSPPKRRMVASVMPWAVEALQDYVANIRPRFTDRADGPLFMTERGTRLQPREIDSRFADYRDALDLPSTLVPHCLRHSYVTHLIEDGADPKFVQEQVGHRFASTTAIYTAVSGDFMNTMMRRTLERGLSADEEWMD

SEQ ID NO: 4318 - protein, 339 aa, synthetic construct
  REGION 1..339: note = TnsF-Tn7 System Protein
MLRGWEAQQIGGRGLAYTTVRDRLGVVRRFLSYTNEFPWNWTPTHVDEWMVTLVSEHHRSKSTIRNYQDAVKSFCDYLVRPEYHWATACEEHFGTHPSQICFEWNTLAHLTDYEGNSDRRPMTREELQRFFDYADDQVDIATRRHRKGALAAYRDATLFKVIYAYGLRCAETSKLDVTDWYRNPKAPQLGRYGNLEVRWGKASKGSPPRRRTVHTVMPWIVDALDDYLTNVRPRYGFSDHAAVWLTERGGRVTPRHIEQRFADYRTALKMDSTLVPHCLRHSHVTHQIEAGVDPRFVQEQVGHRFASTTAIYTGVSGDFMNTMMSHALDKAFEAETESR

SEQ ID NO: 4319 - protein, 96 aa, synthetic construct
  REGION 1..96: note = TnsF-Tn7 System Protein
MATRGMFSTSDLKPLLADRGIALSTSQVYRLVVERPERLSLNTLVALMDILDCRMEDLIEPVTATARRRKAAGANETGSVGDHRPKRARIIGTNES

SEQ ID NO: 4320 - protein, 110 aa, synthetic construct
  REGION 1..110: note = TnsF-Tn7 System Protein
MTTKLDYKWNLRELMATLGMFQTTQLRPKLAERGIRLSDSQVYRLVVDKPERLSLKTLVALTDILGCQMEELVEPVTAALPRRKVIGEAPEDAGVGAFRPKRARIVNDER

SEQ ID NO: 4321 - protein, 350 aa, synthetic construct; identical to SEQ ID NO: 2652
  REGION 1..350: note = TnsF-Tn7 System Protein

SEQ ID NO: 4322 - protein, 350 aa, synthetic construct; identical to SEQ ID NO: 2652
  REGION 1..350: note = TnsF-Tn7 System Protein

SEQ ID NO: 4323 - protein, 350 aa, synthetic construct; identical to SEQ ID NO: 2652
  REGION 1..350: note = TnsF-Tn7 System Protein

SEQ ID NO: 4324 - protein, 499 aa, synthetic construct; identical to SEQ ID NO: 2651
  REGION 1..499: note = TnsF-Tn7 System Protein

SEQ ID NO: 4325 - protein, 499 aa, synthetic construct; identical to SEQ ID NO: 2651
  REGION 1..499: note = TnsF-Tn7 System Protein

SEQ ID NO: 4326 - protein, 1229 aa, synthetic construct; identical to SEQ ID NO: 2656
  REGION 1..1229: note = TnsF-Tn7 System Protein

SEQ ID NO: 4327 - protein, 1229 aa, synthetic construct; identical to SEQ ID NO: 2656
  REGION 1..1229: note = TnsF-Tn7 System Protein

SEQ ID NO: 4328 - protein, 397 aa, synthetic construct; identical to SEQ ID NO: 2658
  REGION 1..397: note = TnsF-Tn7 System Protein

SEQ ID NO: 4329 - protein, 397 aa, synthetic construct; identical to SEQ ID NO: 2658
  REGION 1..397: note = TnsF-Tn7 System Protein

SEQ ID NO: 4330 - protein, 388 aa, synthetic construct; identical to SEQ ID NO: 2660
  REGION 1..388: note = TnsF-Tn7 System Protein

SEQ ID NO: 4331 - protein, 388 aa, synthetic construct; identical to SEQ ID NO: 2660
  REGION 1..388: note = TnsF-Tn7 System Protein

SEQ ID NO: 4332 - protein, 119 aa, synthetic construct; identical to SEQ ID NO: 2662
  REGION 1..119: note = TnsF-Tn7 System Protein

SEQ ID NO: 4333 - protein, 119 aa, synthetic construct; identical to SEQ ID NO: 2662
  REGION 1..119: note = TnsF-Tn7 System Protein

SEQ ID NO: 4334 - protein, 115 aa, synthetic construct; identical to SEQ ID NO: 2664
  REGION 1..115: note = TnsF-Tn7 System Protein

SEQ ID NO: 4335 - protein, 115 aa, synthetic construct; identical to SEQ ID NO: 2664
  REGION 1..115: note = TnsF-Tn7 System Protein

SEQ ID NO: 4336 - protein, 554 aa, synthetic construct
  REGION 1..554: note = TnsF-Tn7 System Protein
MASTIVRGACFRCGREKNLRWNHSLDRGECRACRASRAPQQTCTGCGRQRRINARTPDGGALCVTCYARTRTGDDGCEECGAIGPLAARAGGKGEASRNLCTRCYRNPRRPCGICGRLKRIALKATATSPDVCPTCYQAPVIDCSICGQQALGRRTTNNGRPRCFACQATAQIDAALTGPNGLIRPELLPVRDALTATSRPRSLLTNWHDLASLHLLAEIAQGQLGLTHDALDARPQTFSVTYLRAMLVAADALPPRDENAARLHRYAAHAVAGVDDPELRGVLTRYARWHVVGRAKTNRHGEISTATADRCRRDIQTAKAFIDHLTAHHHDLDNCPQSCLDAWITVDRSRRLGFIRWLKRGGYLPRTRLPEPVPGKDPRHDIDPCQQLDLARRLLHDADSASIEDRAAACLVLLYAQPITKIVTLTTADIRAAAGDTYLTLGREPLLLLPPLDALITALPETKQFGTASALADPRWLFSGKNAGTHLQPPSLMARMNRLGITTRASRNTAMLHLASTTPPAVFAHLIGVSLGTATRWTELSGAIWNTYATTRS

SEQ ID NO: 4337 - protein, 554 aa, synthetic construct; identical to SEQ ID NO: 4336
  REGION 1..554: note = TnsF-Tn7 System Protein

SEQ ID NO: 4338 - protein, 376 aa, synthetic construct
  REGION 1..376: note = TnsF-Tn7 System Protein
MVFMDGQGLGSGASVPAGKVTLLRPAEQLFDEMLTGWTAQQTSRMLTTQTIKTRASQVRRFGDFCGTPPWEWSPADVEEWTTSLVSGARPLSTSTVRAYQNSVALFCDYLTDHRYGWADRCEELFGTHPVQVCHEWNTVIHTSDHEARPAVRPLNRLELQAFFDYADDLVDRARSSGRKGWQTLFRDATLFKIIYAFGLRRREAAMLDLHDFTRNPKGPEFGRFGVCNVRWGKAMRGSQPRRRAVLAVFDWTRPVIEEYVTEVRPRFGTADESVLWPTERQSRIRLDHIDDRFADWRDDLGLDPVLHPHCLRHSYVTHLIEDGFDPLFVQQQVGHRWGSTTALYTGVSGDYRNRTLRRALDAAFTPPTAIQEGSSR

SEQ ID NO: 4339 - protein, 114 aa, synthetic construct
  REGION 1..114: note = TnsF-Tn7 System Protein
MTKTVAYHWHLRKVMNEHGMQSTTSLVPLLADRGVVMTSTQVYRIVTGTPERLNMQLLAALCDLFGATPNDLIEPYVASSSRRGRKTGTTGTAKAPKAGTKNRPTRAVIKPAED

SEQ ID NO: 4340 - protein, 386 aa, synthetic construct
  REGION 1..386: note = TnsF-Tn7 System Protein
MHDLLADASGNVPAGLASLETVLTDVTNHYPVLEWIRRSPAARLLGRLAQSSGSLTHQALDTLSPDANTAYVRGLLVTAGVLPPRQENLARLETWLAAKLAQLPPHHVTLVRPFAEWGVIKDARRRAARGRYSLAAYKGDCTDIRVTIRFLAWLDDQHLHIRDVTQAHLDAWASTHPTQRTRLIPFVRWVHARRIVRDLEIHHRPRQLPGTLQDEATHQAELRRCLTDTGLPLPVRIIGALVRLYALPLTRIVELTTDQFHRDTEAAYLTLDRHPVLLPPALACLIDEQIAQLPGPQSLQSHPHLLLPGAVPGRPRNPAGLADQMKHHGLPIRAARNAALMEVITDLPPTVVADLFGISPATAHRWSQLAGNSWAPYLAARQGSQP

SEQ ID NO: 4341 - protein, 386 aa, synthetic construct; identical to SEQ ID NO: 4340
  REGION 1..386: note = TnsF-Tn7 System Protein

SEQ ID NO: 4342 - protein, 427 aa, synthetic construct
  REGION 1..427: note = TnsF-Tn7 System Protein
MASPHPDGDREKVAFKLPPALQQELKIRCAELGLDIKDAATTAITRWRVSSLPERDIDVSGAKSFSTWLPPGLYDGFKATCSERGLTYIQGLAQSIRSWLDDNPSPKEAGRPAEVRRIIVCNQKGGVGKTTISAGIAEAHAEIPGLGAKCLQNFVESLTDTELERLNRTREQLLALIADYTAGGERVLLVDFDPQLHLSNQLGIPPIPVGAESLVTHMTGEPKGDIKDLVVPIEDPRFGDRLHVLPGTREGFLLDSKLALTAAQSRGFQKETALERALRPLEDDYDVIVIDAPPSLGLSMDAGLYYGRRRPNEKPGRSGVLIPVQSEDSSADAYQMLVEQIEDLEADLHLEIDHLGIVVNLFDSRRGYIATSSLEEWHRLEDQTVIAVVDDLKEQRETVRLKRPLLAYVPESKQANVMRLIVAGAGK

SEQ ID NO: 4343 - protein, 636 aa, synthetic construct
  REGION 1..636: note = TnsF-Tn7 System Protein
MQLTQVRSRLFRNIVDSGDVDIAPDVTALVGKNESGKTALLSAIYRFHPVYPEHSFALGQDYPRWRKVKDTRSGQINDAKPITCTFALDDEDLKAVADALGPGVLKGRSYSRSIPYQGRHTVTLQVDEGAALENLYNDEEIPPALRSVLGTRSMAAALEQAGGLEATEDSDYTAADIDLFTRAARQRLDDSASAWQRAVHILREREPKFFYFSNYQNLPGRIALTDLNGQEEEPGASSMQTARALLELASTTAGALSAEDFEERKAELEAVSNDITQQVFEYWKQNPDLSVEIDLDKTTVQHPNGQQAIASHLDIRVRDRRHGFTNNFSARSTGFQWFFSFLAAFSEFENYPHGVVVLLDEPGLSLHGRAQADFLRFINERLAPVAQVIYTTHSPFMVETARLDRVRIVEDRGPDTGAVVTDEVLSVTDDSLFPLQAALGYDIAQNLFVGPDNLLVEGTSDYTYLTLISDFLKEAGRTHLDDRWRILPAGGATNIPAFVALIGTSLQATVLIDSTPAGVAKLKTLTNKGLLSPKRLLLTDAFSDGVKDSDIEDLFSPGDYIKLYNAAFGTKLKVSDLNGNDRIIARITRATGAPFTEHGRPADALLRKRDSLLPGLSETTLSRFEQLFSAINSTLS

SEQ ID NO: 4344 - protein, 636 aa, synthetic construct; identical to SEQ ID NO: 4343
  REGION 1..636: note = TnsF-Tn7 System Protein

SEQ ID NO: 4345 - protein, 363 aa, synthetic construct
  REGION 1..363: note = TnsF-Tn7 System Protein
MIHWLQRSGAARLLARLVVERAEVTHELLDTLPQDPHTRYIRELLVTVGILPRRHEALERIRLWIDKTVAALPPHQARIVRPFAEWHVLKTARRAVARGRYTAGSASNDRMEIRHTIEFLTWLDTGSLALADVTQHDFDRWLSETSSSRRRGITPFIRWAGARRLSRQLDLAPCKSGNPSQFLDEDEMNAQLHRCLNDDTLPLEVRITGSLIRLYALSAARISELTVDGFCQDETGSYFTFGNEPVLLPPKLAQLIEEQIAPRRISLFIPTAEDDPGFLFPGNPASRPRSAHSVRNLLKQHGLLTLAARNTAMIAMISDMPPKVVSDLLGLSPDTTTQWAEYLQDSWADYLAAKTGFIGECEC

SEQ ID NO: 4346 - protein, 363 aa, synthetic construct; identical to SEQ ID NO: 4345
  REGION 1..363: note = TnsF-Tn7 System Protein

SEQ ID NO: 4347 - protein, 259 aa, synthetic construct
  REGION 1..259: note = TnsF-Tn7 System Protein
MMASPQRAAANISATCARSWSTHGRTASECTQHDVDAYLTSGPTTRHLIRTFFVWAKSSRINTRVQIGFRQARTTPTITQEQRLAWLKELLTGDSESLPYRVAGVLVLLYAQPLTKIAALQSTAISQTDGETLITLGKQPIPVPEPFASQLNYHLRHRPNLRTAGGAVGTPWLFPSSRPGWHLDPQTIMHRLRWVGINTLGSHNTALKELVAQVPAPLVAEMLGYSDQVTQKHAAEAGNTWAAYASTAPERSSMSPPKQ

SEQ ID NO: 4348 - protein, 259 aa, synthetic construct; identical to SEQ ID NO: 4347
  REGION 1..259: note = TnsF-Tn7 System Protein

SEQ ID NO: 4349 - protein, 178 aa, synthetic construct
  REGION 1..178: note = TnsF-Tn7 System Protein
MTSDEVVFIGGRSGTGKTSVGFEMHAQLSATGVTHCLIDGDFLDMAHPVPSHADCLAERNLAAMWANYRALGYHRMIYVNTASVLPEVMDRLTTAMGGNPTVVSILLTCTDATARVRLGKREIGSTLEQHLESSNEMNARLESGVAAATHHLPTDDRSVSSIAADIINLTKWQSSRPR

SEQ ID NO: 4350 - protein, 178 aa, synthetic construct; identical to SEQ ID NO: 4349
  REGION 1..178: note = TnsF-Tn7 System Protein

SEQ ID NO: 4351 - protein, 285 aa, synthetic construct
  REGION 1..285: note = TnsF-Tn7 System Protein
MFLRQLLVQAGVVPPRDDDLERIPPWLDTLLADEPEHRARPIRPFAHWFVLRRARRLAARRRHPSEVGRELRKQIRVAPEFLTWLDAQGLDLSTASQTDLERWLSCGNTRSYDVRYLVAWARSRQLISNLWVPSRARPQPEHLLDEQRRWQLLERCFDDTSIALDTRAAAALILLFGLSITRVRHLTTDNLQQEDDDTYLKISARPLLLPPKLGRMLTDLAGGEHQRSRYKQRPDLQKWLFPGLVPAKPLSADGLQCELRELDCSPAQPGTLPSSLLPLTYLQPP

SEQ ID NO: 4352 - protein, 285 aa, synthetic construct; identical to SEQ ID NO: 4351
  REGION 1..285: note = TnsF-Tn7 System Protein

SEQ ID NO: 4353 - protein, 489 aa, synthetic construct
  REGION 1..489: note = TnsF-Tn7 System Protein
MYVEPSSGELELEERSSLRRVAGLSTELADVTEVEYRQLRLERVVLVGVWTEGSAEQANASLTELARLAETAGSTVLDGLVQRRQRPDPATFVGSGKVAELRDTVLASGADTVICDGELSPGQLRQLEEKLKVKVVDRTALILDIFAQHARSKEGKAQVELAQLSYLLPRLRGWGEALSRQVGGRAAGGVGIGGRGPGETKIELDRRRIHRRMAKLRREIAAMRTVRDTKRGSRRRNEVPGVAIAGYTNAGKSSLLNAITGAGVLVEDALFATLDPTTRRNRTEDGRAYTLTDTVGFVRHLPHQLVEAFRSTLEEVAQADLLVHVVDGADPMPEGQIKAVREVLAEIGEQHGGAMPAELLVINKVDAADDLQLARLRHLLPDAVFVSAHSGVGIDRLRDEIAARLPRPSTELEVLLPYTEGALAARLHEQGQVLAEEHRAQGTWLRVRVSEDLVALVHDFVVSGGPGPDSADVDAAGDVVTELPRGAAR

SEQ ID NO: 4354 - protein, 489 aa, synthetic construct; identical to SEQ ID NO: 4353
  REGION 1..489: note = TnsF-Tn7 System Protein

SEQ ID NO: 4355 - protein, 570 aa, synthetic construct
  REGION 1..570: note = TnsF-Tn7 System Protein
MQANWPVGTLCHTCFQRRKRNPALCAQCGTLRTLVGRTQDGNICGPCSGTDIDFACRRCGYPGDIYADGSCSRCVAKDRVRDLLSDEDGAVHPQLQPLAEQLGAAQSPTAVIAWTRRSDSARMLAGLAAQHQEITHDLLDGLPQEWRTLYVRELLVAAGILPKRQENFARLRLWLKDTLADLPSHHARVIRPFAEWGVLRDARRRADKGRYTAGSASNDRTDIRTAIKFMTWLDDNSIALADLSQEVLDVWLTSHSAEVRGLAAFIRWAVARRLTGKVTVPSKRYGLPSRFLHSEELNQQLRRCLNDDSLPLEARIIGSLTGLYALPTTRIVELTTDRFHRDGDDSYLTIDRNPVLLPPPARRPYREADRQPQLPHLRAAAAARRHTRLPLPRPAAEPSPTRRHRPQLHEEARPSGHQRPQHGHDGSHHRPPAHRCQRPLRHASPHRLRLGPVRPEQLGGISRSRPSRRIGGVAESPSHRWSDPCTRLGKELGGGARGVGEGISLRRSYGRGLGMALQICTVRYIGTFLGDDPLAVPWEVVDYLGGQLGIEVVRAAADDAVQPRTEPRRP

SEQ ID NO: 4356 - protein, 570 aa, synthetic construct; identical to SEQ ID NO: 4355
  REGION 1..570: note = TnsF-Tn7 System Protein

SEQ ID NO: 4357 - protein, 426 aa, synthetic construct
  REGION 1..426: note = TnsF-Tn7 System Protein
MIVCASCAGVASIFACYECGREDHPYGFSRCARCFLRERLAELLTDPTTGQIHQRLRPVFDDLANVQRPQTVLWWLRKKPGAGPQLLRDMACGARDISHDTFRDLPSNRAHDYLRSLLVAIGVLAPIDIRIERMLPWIEDVVAGLPTDDAALIRRFAHWHVLRHMRTASHEDRLTKSMTDACRRRVRVAIELSAFLRTHDASPATATQDMLEHYQALIRRPLTHEYAFIVWLRQSRINTTLSITDAPRTPPSVTISDAQRWDAVERLLHDNTVRRYTRIAGLLTLLFAQPLSRIVALRTVQVTVNGDNTVNVAFGATPVQMPPLLDDLIRQHVEHQGEGPYASRHAGWLFPGGMPGYHLTTENIRSQLVAIGIKPYENRKAALFQLAGDMPAPVLAELLGITSKNAADWAQLAARDWTHYVAERAR

SEQ ID NO: 4358 - protein, 426 aa, synthetic construct; identical to SEQ ID NO: 4357
  REGION 1..426: note = TnsF-Tn7 System Protein

SEQ ID NO: 4359 - protein, 505 aa, synthetic construct
  REGION 1..505: note = TnsF-Tn7 System Protein
MKSDGELMEILNAYDLTGSYRAAAELCGCSHHTVKKAVEDRDAGLPPATRRARMIDDWRDLLETWVADSKGKIRGDKAHDKLVALGYSGTDRTTRRAVAEIKAQWRLGNTRVHRPWITEPGLWLQYDFADGPLVAGRKIVLLVAWLAWSRYRVVIALRDRTAPSVFAGLDRIFRILGGAPTYLLTDNEKTVTTGHTAGVPVRNRAAVTFGRYYGISVLTCEPADPASKGGVENAVKLAKADIVPTDTNLLPQYATFADVEAACAEFNAEINARVHRTTGRRPVEMLTQERPALHAVPDLPHTAALGVTRRVPDNTPMVTFEHCQYSVPATLLGQTVWIRHHDSTDEVVICALDDGGPIEVARHRRATPGSPAIHDDHFPDHRDKVPGDYRVRARTASEQTFLALGPGAAVWLKEAAAVGTERILQKMAHAVELSALAGCSDVDWALGHAAVHGRFATGDLDSILASKGMDPTRRGAGEDTSLAQGTSGWNLFGRTTIDAPEAGIA

SEQ ID NO: 4360 - protein, 524 aa, synthetic construct
  REGION 1..524: note = TnsF-Tn7 System Protein
MTVDVRDHLVIIGANDVGKTWILRLLHALLGASVQQLFQTFTLTDIREGEDELSVVARLEDLDADELALFPFETSVEAGEPNYLVLQLEVRPSEEDPDNVAITRFFPDSGTRRGPSRNQLLAIGWRYLPATRSSGPEFMDGRTSPFRTMLDSADLGDEIEDFGALLQEFNNKLEENTALLELRKTIATHLSRSVPKTYTEDALAIRTSADPVDQPLQDVTIYLREGDRFKSLSEQSDGMRQLMALTFFDLAQVRSNIVAVDEPEIHLHASSQRTVAALFAESPKQRIVVTHSPYIVHRFEPKHVLVINPASEARQLAEENFSDVEKEMLHWWSPYLLESLTARRVLLVEGLADRILIEAAARALGIGLDRIGVSVLALDGADKFSHVLKILGRNGFRLPVCGLCDEDREQSWAGTLGLRPRALEQNGFFVARKDLEHEYVRAAGVKKVVDALIAAKVARTEGITQSTGAADIDSVTPDQLGTFLSSVDSRKVPAARAVAPILTPEIVAASPSLMGLISFLKADA

SEQ ID NO: 4361 - protein, 524 aa, synthetic construct; identical to SEQ ID NO: 4360
  REGION 1..524: note = TnsF-Tn7 System Protein

SEQ ID NO: 4362 - protein, 551 aa, synthetic construct
  REGION 1..551: note = TnsF-Tn7 System Protein
MDTKKPRGRQQEAVESSANCLLVIAPPGCGKTEVLAMRAEHLLASGKIRPNRRILAITFTNRARDNLRSRLEEQLGGNRLRSSILVANFHELSARIVEAHHRTIGLAPGFTYPRPAWLRRALSELTSDRARHRQVKEILGSLKREPLTDGQLVERIRETGNSDVLALEERRLEANYIDFGDLLRHTQLLLRNKRVSHLFQLHFDAILVDEFQDLSLQQYEITQHMCSRNITYVGDPHQGIFGWAGADPVHVLQDIRSRADQTIDLDVNFRSSPAVLRVINSVSSSLGSAPLHAAEPEEWKSGDHAYAVQYATDSDEAAGIVSLTDYLAEKCPEDTVGVICRAEYRRSALNSAYENARYTPQFWDYALDNPRVTRLLKRHSKHVDAGLTFDQQVDELRERATGSFNPADVDAISEVHEACEQLMQHTDSNLPLSEFMNRLRDTTMSAISPGVHVLNAHVGKGQQFDWVVVMGLEEGHVPSSYSTTPAEVLEDQRILLVMLSRARKGVFLTCARSNRNQYGRLFHNEASRWWTDMESSCQPLSPSVAVAMRVM

SEQ ID NO: 4363 - protein, 551 aa, synthetic construct; identical to SEQ ID NO: 4362
  REGION 1..551: note = TnsF-Tn7 System Protein

SEQ ID NO: 4364 - protein, 1950 aa, synthetic construct
  REGION 1..1950: note = TnsF-Tn7 System Protein
MVMTLHKLTAGDGYLYLVRQVAAADSTERGRSTLADYYSAKGESPGRWMGRGLAALSDTGRCEVTPAVREEIWTVEEGSAVGEAQMRALYGVGLHPNAERIQNYVMNRGMGSQRAASRLGREFQVRDGEPEFARRLAVAFRDHNAEIGAHWNATISPEDRAQIRTRVAVKLFGEEYGRPPADDRELSGFIARNTRAKTTAVAGYDLTFSPVKSVSALWAIAPLSVAEQIEAAHDAAVADVLEWLQDQAAFTRTGAGGVAQVDTEGLIAAAFTHRDSRAGDPDLHTHVAISNKVSYVDANGVRRWLALDGQPLHRVTVAASELYNTRLEAHLIASLGVRFVEQSRGCGKRAVREIAGMSAELMSRWSSRRAAIKARAAELAKQFQADHGREPTNVEIISLAQQATLESREAKHEPRSLAEQRHVWRTQAVEVLGHHGVSQMLADTLAAPQTTRETVTIDEEWIASRAGELIATVAETRSTWQRHHVRAEALRMARAHDVAHDVALVDKLTETALGDTFSIPHARVADAELGEPVALRRRDGASVYRRHGVEAYTSREILAAERRILDAVHRSDGRVASAADVEMALADSAAGGRTLNPGQAALVSEMATAGRRVALALAPAGTGKTTAMAALAHAWRSSGGHVIGLAPTADAAIVLGEDLGAVTDTLDKYVWSADPDKAATSRVPDWFTQVGPDTLIVVDEAGKAATAGLDAMITDALRKGASVRLVGDDGQLSSISAGGILRDIAEATDALTLSEVVRFKSPAEAAAGLALHDADPAGIGFYIDHHRIHVGTDETAADMAYQAWRADQAAGGDSILLAPTNDIINELNARARADRLAADPDAATAPSVMLADQLHASVGDTVRTRKNNRRITIGRNDFVRNGYRYTITDVLPEGGVKARHLRSGRIVTLPADYIAEHVTLGYAATIDSAQGLTAGGRATRGTCHIVGSDMLTRQHLYVAMTRGTDENHLYLSTAEGDPHRLLSPKATHPDTAVDVLTRTLARDGAQVSATTAARQAADPAARLKAAADMYYDALGSAAENRLGVGARDRLDALADEIIPALSQREAWPVLRRNLSILALRGANPRELLTEALAKGSVADAADPAAVLDHRIDPVGTHSAGIGVLRWLPAIPQALADDPQWGAYLARREALVEGLATEIRTRARAWTNANAPAWARPLITVNPVLTAEIAVFRACTGVDEADTRLTGARQFPVRTRDVQSALHRYASADIGRRSADTTRWNDLIDSIDPRLRTDAYWPQLATQLLQAARTTPDLRQIITTAAHQGSLPDELPAAALWWRIAGALSPTATLATTHSRLRPPWVSDLDVVFGTALAETITSDPAWPGLVAAISAADPRKWTPRDLLHVAAEQLADAAHDDQPIPPGDYARLITYTVDAFTHRLHARLGVDFDDLPTPQDAPPDPAEEALFPPDPEDPSTHSLDEHSPFDDHFDIAPPEDIDALEYGSQEYAGLEFEDFSANRPTPELGITMESLTALRAEYRIVHDHIRTLAADIRAGNGPATRAAAGDLLRMRGQVDADRPYRHAVTNVMEQWADADAAYNETLRLVEHSRTQLDLLLATHDADELDIISARQTVAFYTGLLPAQPPSLQFQQTLADAQAARAAAAGGTIVTENDIVIARGDAERADLAELAALRQRRRELHRDIERADRDIATAFAAAQTATSDTLDQLLESARAEVELLQLAGHLDPKSVPLLIPGSALSGLEPQTGDRLKSLAALPYRLAVVGADIEDSETAAALYTLRSAANADDRKVLWLAASESSSAPARDAELADTITTIGHAHQQVSDHQWMLPPGAIVVIDDPATADPGQLIDLARHAMAADARVILIEHSTNAGASSSAVRLLTQSLPWCTTLTAAPTEPSDPLLEPVPAVALADRLGRTHLSESWRHVLTQYDGAARAARAAHRRHLALGWRTPGPEVDGPEHTLGAGIDD

SEQ ID NO: 4365 - protein, 1950 aa, synthetic construct; identical to SEQ ID NO: 4364
  REGION 1..1950: note = TnsF-Tn7 System Protein

SEQ ID NO: 4366 - protein, 374 aa, synthetic construct
  REGION 1..374: note = TnsF-Tn7 System Protein
MLSVPGSAHLVLASGVVHLDEPSAVFEAMLLGWGRQQASRLLGQATIESRLALVRRFAAFAEAHPWDWTAGDVEDFTAALMSGPTRKAPSTIRGYHMSLRMFCDYLLDGRYGWIAQCENRFARIPSQVCHDYNTAAHLVEYEGKPARRPFTYEEVETLFGFLDDRVEVLARSGRKGALAALRDAQMIKTAYAFGLRRRELCYLDLADLRPNPRMPAWGTFGAVHVRYAKSSRGSTPRRRTVLAVPEFDWVIEGLRQWVDHGRPLLSPGTRQELWLTERRGRVATKSMDKRFAFLRAEAGLPKDLTLHCLRHSYVTHLIEFGYPERFVTEQVGHSYASTTAIYTSVSNDFKTKTLQAALRRVYGSATTHEGKNDH

SEQ ID NO: 4367 - protein, 258 aa, synthetic construct
  REGION 1..258: note = TnsF-Tn7 System Protein
MTTTTTAAALPADVETLMRGLRLPHARAIAADVLATARAQRWDPTEVIKALLTEEAAGRARSMLAARRKAAGFPTGKTFDAWDPGASSIPLPTQQALQTLEWVGRRENLVVCGPAGTGKTFFLEALGQKVIEAGMPVAWFTLEQIGVLVRAHRADDSLGKAVAKIVRAELVVIDDVGLLPVGADAAEGLYRIVEAAYERKSVAISSNLHPSGFDELMPKTLATATVDRLLHHAHLCQTSGDSVRLAQALHGKGVKPLT

SEQ ID NO: 4368 - protein, 258 aa, synthetic construct; identical to SEQ ID NO: 4367
  REGION 1..258: note = TnsF-Tn7 System Protein

SEQ ID NO: 4369 - protein, 96 aa, synthetic construct
  REGION 1..96: note = TnsF-Tn7 System Protein
MAQNGMFATTDLVAPLHERGVEISRQMVHRIATKPPQRINLDLLAALCDILSCTPNDLLEVVQEQIRETPAVNDSGPGIGELRPIRVTIRRPSDNQ

SEQ ID NO: 4370 - protein, 346 aa, synthetic construct
  REGION 1..346: note = TnsF-Tn7 System Protein
MARVVHDMAAGRTPISLLSVARVRATGASGYLAALLMEAGVVPTENFDRIRLEVWEEEYFGTLPNPTHRSLLKQYAAWIVNPRFTDAGHLSTKDESLRHRGSKAHLIAVSELLSTLDSLNLDLGTVPQRTFDNYVATHGRTGKQLTPFIRWARVRGLTRLHSEYQQSHLGTSSASDDERWAWAKDLLTAEDLGLNARIGGLLSLIYGTALTRVVSLRRDAVKLDGDSTYLSLGTEPIKLPEVLGSLVRRLLDTAPASLHDNNIWLFKGQRAGRHLTTAAIRGPLAPRGINLRSARNVALMILARDLPPSVLADLLGISIYAAERWSTHSGHDWADYPRVRITTEPR

SEQ ID NO: 4371 - protein, 535 aa, synthetic construct
  REGION 1..535: note = TnsF-Tn7 System Protein
MYATPTEITHEADRRRTVAIIAHPDAGKSTLTEALLLHAQAIESAGVVHGKSGRHHTVSDWSAIEQERGISVTSSALQFEIDGTVVNLVDTPGHADFSEDTLRVLAVVDSAIVLLDAAKGFEAQTLQLLDVCLKRSIPVITVINKWDRPGKHPLELIDDIERVTTMRPMPITWPIGDAERFSGLYEPLSKKAYRYEQSSAGAHRPEQTPVPEADLDSVFGADGSTCLDEIQLLQLDGYAFSPADFLARAGTPVFFSAAHRNIGVGQLLDFISRHGARPGARIDISDNPRPVKTDFSGYVFKIQSGMNRAHRDRIAFVRVCSGVFERGMVVHHAQTGRPFTTKYSQQIFGSRRSTLEIAWPGDVIGLVNATALSPGDTLYGETPVAFPPLPHFAPKHFRVARATDGAKYKQFRRGLELLRQEGAIQVFIAERLGEQSPILGAVGPLQFEIVSSRMAEEFSAPIDYEELPMTLCYGSTTEAHEALAKRSQAECEVATRADGSVVVLFSSIWKYQAIKRDRPELEFFSLSGSNETNEP

SEQ ID NO: 4372 - protein, 535 aa, synthetic construct; identical to SEQ ID NO: 4371
  REGION 1..535: note = TnsF-Tn7 System Protein

SEQ ID NO: 4373 - protein, 369 aa, synthetic construct
  REGION 1..369: note = TnsF-Tn7 System Protein
MQHFLDVSNLRQVLSLDSGTAALHPDEAVYESMLGSWEQQQRSRSLAEATIEGRTSTVRHFTDYAGSYPWKWQASDMDEYTSHMRSKRLAISTIRQRQGILQVFCSYLISPDYDWVEICEAQFGETPSQICLPWNTTKHVADYEGLPAKRALTFDEIEMLFNYADSRVETAIRDGRKGALAALRDAQMFKTAYAFGLRRAELRGLDIHDLHANARVPQWGQYAALHVRWGKSSKGSTPKRRTVLLIPELSWWIDGMQQWVGEGRALFAPGELPALWPTERKTRVSLEYIDRRFTALRREAGLDPALTLHCLRHSYVTHLIEYGYADRFVQEQVGHQHSSTTAIYTSVSGDYKNRILADALSRFNTLEVP

SEQ ID NO: 4374 - protein, 673 aa, synthetic construct
  REGION 1..673: note = TnsF-Tn7 System Protein
MTLTAPTPRQHSSPPSARFRPEINGLRALALALVLIYHIWVGRVSGGVDAFLLISAFLLTSSFAARAANNRPLAKYWRKIFLRLTPTATAVLLATLASIMLLFPEIRWTQLIQHAWASLLYAQNWALVLESGNYQIADAATASPFQHFWSLSIQGQVFILWPLLLLMAAVIARRYRPSFTAIAAALFLTIFLGSMAFAIAEANAGSGSAYFDTRARLWEFALGSLLALALPHVRLRPGLRVVLGWVGLLGLASCGILIRDVAAYPGWGSLLPTLSAALVIAAGSTAHRWGADRWLTARPIQRIGDLSYGIYLWHWPLLVVYFVIKQKDAVTIAEGLGIIALAVLLAWCTERFFDRPLRFLATTYERISASFLVVLAVMVAVPLLEWQNRIHHAETQLQHQSRELNPGAAALGANDFEWSTNALPIPAATALDEQWGNAGPACEQKYAPDHAAIDSCHQIEPTAPAQKTIAVIGDSHARQLMTGIMPLAQERNWRVISLLKNACRYGAESTERDPACNAHNAAAREHVLEISPDAVITLGTMSLAQAPRETMVPEYAAGIEPFLENKIEVLAIRDNPRFDFNMYECVALHGSSAAQCNPPRNEVIPPDNPLEELSADVPLLHSVDFTDAICTQLTCPAIVGNVYVYRDYDHLNKTYVETMIPAIKREILEKTGW

SEQ ID NO: 4375 - protein, 114 aa, synthetic construct
  REGION 1..114: note = TnsF-Tn7 System Protein
MTKRVETVWNLRRLMADQGLFKTTELIPMLEEFGVNLSREQVFRLVTQTPERANLSFIGAVCAALNCTVSDLIEVRVVDEKAVVNAVEPSRGSIGNLRPVPARIHRPPLTPQGK

SEQ ID NO: 4376 - protein, 474 aa, synthetic construct
  REGION 1..474: note = TnsF-Tn7 System Protein
MCKRCSRYPQALCSACGHPRPRRLGTSEPTCPRCGADGIQTCPTCTGDRFSISTSQATIRCLQCRLRIIITGLLADSDGHLIDQIKPFINQLALADDISQTTRWLRAGRAADVLKPMARGHAPLTHDTLDDAAGDLRGKAAGIEHLRRLLVAAGVLPARDEYLTRLERDIEARLAAVHETDRAVLRRFVSWYTMPRVRRRIASGRDSRTTCYLARCSLTGPSRLLRHLRRNGVPLAALRQADLEQWTADNPGYVTDAVLFLRWAHRQRLAPGLDLPRQRMQTPREFTDAQHQWAIARRCLTDESLTHRARLVGALVLLYGQTSTAIARLRRCDITSIDSITHIRLGADAVALDNTLGTIARELATADAPDARPRGLARAFNPDGDGWLFPGRGPGKPLGEAALRMELRKLGISTRAGRNTALLTLARNVPPMLMKDLLGIGASTAERWREHAGGQWAAYAADDPPHATGEPPGV

SEQ ID NO: 4377 - protein, 474 aa, synthetic construct; identical to SEQ ID NO: 4376
  REGION 1..474: note = TnsF-Tn7 System Protein

SEQ ID NO: 4378 - protein, 1135 aa, synthetic construct
  REGION 1..1135: note = TnsF-Tn7 System Protein
MTTNFDFIKAEWPEVFADCARAEGYGRTDPRSCAFYARRVVEQLVHFIYDIEQLPLPYKTDLAAHLGESSFKRVAGQTRTKMDYLRKVGNLAVHENKSIPDQTALQVLRELFHVVVWTAFNYSTAPDAVPTGAVYNPSLIPAPQTAGSERPLSAAELNKLLVTFEEKDRALGEARANNATLQAQIDELRAQILAAQGAKSQTDDHDYDEAETRRRLIDLYLAEAGWALDQKRDREYPLTGLPTAGGAGFADYVLWSDSGLPLAVVEAKRSAKDPSVGQHQAKAYADCLEAMTGQRPVIFYTNGYEHYVWDDAAGYPPRQVAGFFTKGELELMIQRRTTRLPLDGAPIDKEIVGRHYQLRAIRAVDAAFEKKERKALLVMATGSGKTRTVIALVDQLMKSNWVKKVLFLADRTALVRQATNAFKAHLDHVATVNLLDDKVGDARIYVSTYPTMMGLIDESHESLRKFGPGYFDLIIIDEAHRSVYQKYRHIFEYFDAMLVGLTATPKDEVDHNTYSLFELEDGVPTDAYSLGEAVAEGYLVPHVGVSVPLKFMREGIRYDDRSEEEKDEWDSLEWSEDGDIPDYIDTETLNRFLFNADTVDKVLATLMDKGHKVAGGDRIGKTIIFAKNQDHARFIQRRFDAQYPWFGGSCAQVITSSTEGAEHLIEKFSTPATEPHIAISVDMLDTGIDIPEVVNLVFFKLIRAKSKFWQMIGRGTRLCPDLFGPGEDKTNFYVFDFCQNLEFFSQPEAGSEGSTQKSLSQRLFEARLGLLLGLGASSAAYDLEGDGTTSVGGLRSDTARALRDFVAGMNVDNFIVRPAREWVERYSDLAAWNGLAPEAAGRVAQQLAGLPSAVVDSDENAKRFDLLILKIQLAQLDGDLVAAERVRGQVQEIAGSLLSQTAIPAVAAQAELLERISGEEWWVDVTLPMIELARRRVRGLVGFLPKARKKVVYTDFRDELGEESIVDLPGVSVGTDWDRFMKKTRAYLKDHGDNVALQRLRRNRQLTASDLSALEQMLLEAGAEHADIEKASEASHGLGLFIRSLVGLDREAAAEAFSQYLQDSKYTIDQVRFVNLIVEDLTANGHVEARRLFEPPYTDDAPQGVLSVFPEADAERIVAVLNEVRQHATTTGGAA

SEQ ID NO: 4379 - protein, 1135 aa, synthetic construct; identical to SEQ ID NO: 4378
  REGION 1..1135: note = TnsF-Tn7 System Protein

SEQ ID NO: 4380 - protein, 1074 aa, synthetic construct
  REGION 1..1074: note = TnsF-Tn7 System Protein
MTLGAGFRYLMSSVARGDQAGRTSDPLTAYYAAEGTPPGRFLGAGLAGLDAGRGVAAGSVVTEEHLWRMLGMLQDPITGAPLGRAAGAASTAPVDPEGRPRKASKTVAGFDLTFSAPKSVSVAWALADDQTRRRIHAAHEAALGFVIGYAEEHVFATRTGRGGIVSQDVRGVVAAAFDHWDSRAGDPQLHTHVVVLNRVQAASDGGWRTLDSKALFRAAVGLSELYNGVLADLLTAELGVGWEPQRRRRSAEPKWEITGVPAALREEFSQRSGQIEAAKEELVRQFVASHGREPTSTEVLKLRQQATLATRPDKHLTPLSQLVDGWRKRAEPHVGADPVAWVATLASRNDLPLLRASDLAEEMLVDAATVALDHVAAKRATFTRANVLAEALRQVAGVRFVTPGERVTIAEHVTDLALEQAVRLTPEEARMDLLPDALLRPDGSSRLRPRDSIQYTSREVIAAEERLVDAGRSLDAPTVDADMAAAAAAQPLPGRDHPLSAEQADAVCRVARSGRSVDVLVGAAGTGKSTAMAGVRAVWEARFGPGSVVGLAPSAAAAEVLADAVGVATENTSKWLTEAARLPERQAKLASLHARLDRASPSLRTRALLNQARRTSDEIVRWSLRPGQLVIIDEASMAGTLELDQITTQARAAGAKVLLVGDWAQLSPVAAGGAFKLLATDRDDAPQLLDVRRFRHEWERDASLRMRNGRPAAAEEYLRHGRVVGGDREIVLDALFESWQADTTAGLTSLMMSADAQTVIDLNARARAHRVRAGQVSEEGVTIAGGTTIGIGDLIVTRLNQRDLVTGEDTTTRSGEWVKNGDQWVVTAIGSDGSLRARRAKGARVATLPASYVREHVELGYATTAHRAQGRTVDTAHAYVSATTTREPLYVMATRGRESNKLYVDTMWDPDHETSHDDVEPMDPVDVLKAVLAKPGSDTSASATRAAEVAAAVSPSRLASEGASVLEARREDRYLRILKSAGFSDHEIEDAKTADALRPLIARMRHAERLGVDLGAGPAVRDGNTPRGQLPTSFVSLEEYEAHLVREMAVSGERLQDKLLISPELSVRGMELSR

SEQ ID NO: 4381 - protein, 1074 aa, synthetic construct; identical to SEQ ID NO: 4380
  REGION 1..1074: note = TnsF-Tn7 System Protein

SEQ ID NO: 4382 - protein, 404 aa, synthetic construct
  REGION 1..404: note = TnsF-Tn7 System Protein
MGDRRDEMVAARLVPSSVVHLHPEDAVLEGMLAGWRAQGRSRGLSPGSLGMRDRLVHRFVEFTGEYPWRWGPDDVEGWSSQLRDDGLTLSTLRGYQAAVRIFCDYITDSRYGWAKECWDRFGEHPVQVCHEWNTVAHVAEVEARPAVRALTREEIQRFFDYADDRVEAAQRSGRKGWISAWRDAALFKVTYGFGLRRREVARLEVVDFHSNPRADEFGRFGVCNVRWGKAVRGGPPRRRSVLAVMQWSSAVLSEYLEVRQEYGDRAGTWLWPTERGGCLSTDYVSRRFAEYRDQLGLPRELHPHCLRHSYVTHLLEDGFDPYFVQQQVGHRWGSSTGLYSGVSSDFKNRSLRAALDRLVANEPTSQATWSPGSATRPQNLTILGPDGRSMRGAESGPDDNPEVQ

SEQ ID NO: 4383 - protein, 118 aa, synthetic construct
  REGION 1..118: note = TnsF-Tn7 System Protein
MMRSVQIQWRLRQVMAERGLFSTTDLQPLLAERGVVLSATQVYRLVTHPPERLNMQVLAAACDALGCSPDDLIGITVTEAPAGVAVAGGGGPLRPSRRALGAGASPARPTRVIVARDE

SEQ ID NO: 4384 - protein, 362 aa, synthetic construct
  REGION 1..362: note = TnsF-Tn7 System Protein
MDLHRHLLAADPQYVLRLIKSKAAWTILEAALASPGTLTHEDLDELGTPRAVSQVRSLLVEHAVLFERDEYAHRLRAWTVTQIAALPYSSDQLALRQFVRWRQQRRTRPGPLTNTTAANDKRELRLILGLITYLNASNQTLSTASQKIVDQWVVQAPRDAFRVRRFLRWSVRSGTSSPLVPPIYGGNSGFNLGGSIGQTNEAALERALNDDSMNPRTRLAIVLTTVYGIRVHRIAELRLEDLSIKGAVAGVHLGFVRLELPAATIPWITMLLAGVPTKRRFGGSIHNTIWVYPGYQHGEHQLPSSLAAHLRVYGISPITAHQAATATIITHVPPAVVARILGVSLDTAAGWHRSAGTHPTYR

SEQ ID NO: 4385 - protein, 197 aa, synthetic construct
  REGION 1..197: note = TnsF-Tn7 System Protein
MKVALVNLKGGVAKTTSSVYIAAALTREGTVVLLDGDPQGSASDWTGLVEDSGETLPFTVKVVNQRTMKKAAQGFDHSVIDTPPGNPQVIDAAIATADIVVIPTDASAMDIQRVWPSIEAATRAGKPAAVLIVRARLNTRSLAIAVETFEKAGAAVIDAHIPLREDIKNAYGTIPTNLHGYDQVATDLLEVHSGIAS

SEQ ID NO: 4386 - protein, 197 aa, synthetic construct; identical to SEQ ID NO: 4385
  REGION 1..197: note = TnsF-Tn7 System Protein

SEQ ID NO: 4387 - protein, 360 aa, synthetic construct
  REGION 1..360: note = TnsF-Tn7 System Protein
MASIHLLAGVTYLDQESSVFEAMIEGWCAQQLGGRRLQKATVENRVHVVRQFRVHSGVGPWKWTAAGFDEWMMDLVSIRRMMPSTVRNYQIVIRQFCDFISSSHYGWADQCEERFGTHPIQVCHDWNTRPHLQDHEANPRRRPLSRGELQQLFDRADDEVQTRLAAGRKGAAAAYRDATLLKVVYAWGLRANEAMMLDTTDLYRNPKVPSFGDYGFLRVRYGKASRGSPPKPRTVATVMPWAVDVLKDYMDNVLPLMRHGTSNALWFSERSRRLGARSLSDRFALYRDELGLDSSLSPHCLRHSYATHLIEDGHDPLFVQRQLGHAYQSTTGIYTHVSEDFANRILREALTKIPPLAGPT

SEQ ID NO: 4388 - protein, 114 aa, synthetic construct
  REGION 1..114: note = TnsF-Tn7 System Protein
MTDIIGYEWRLREQMATAGLFSTTKLLPLLEERGIHLSASQVYRLVAERPERLNLHVLVALMDILGCTADDLISKVSLGRSDQRTGTDGPEKANSASAVIRARGLHPHRAQVSD

SEQ ID NO: 4389 - protein, 225 aa, synthetic construct
  REGION 1..225: note = TnsF-Tn7 System Protein
MTQHEVDAWLAVNPGTRFPVRDFVVWATRRGHAKVLDVPHWPKKDPVGMDEDFHWELLLHQRLTDTELPLGVRGAGGILLLFGQHLTRIAALTTHSVTTLGEDTLLTLDRTPIPPPSSLARLLTDLANMPPPTNWAANSSQGWLFPGGRPGQQLSATVLGRRLASHHIPDRPARNAALVAPAQDLPPAVLGPMLGLHPVTAAHWRRRAATDWTAYLEARTSQAHS

SEQ ID NO: 4390 - protein, 1104 aa, synthetic construct
  REGION 1..1104: note = TnsF-Tn7 System Protein
MLACLLAARGAVVSVDRLVEDLWRGTPPAKATVSLHAYVSNLRRVLEPDRPPRTPAAVLVTSPPGYALLLPQEAVDAWRFEDRLDRAQRAPAAQARQLLAEALAWWRGPAFQEFSDETWARPEAARLAALRADARELALAADLRTGHTVRAASAAEALVGEHPLREEGWRLLTLAHWACGRRADALAALRRARAVLREELGCDPSRALVELEQALLDQQLEVLHAHVPEQRPGTAGPDPRTEIARPGHGSTPNAGSGALPAGRPPLFLGRTKELAAADTAAREARTTGGLLLVTGEAGAGKSAFLDRFAHRLRREGWTVVIGRCPGHEGAPPAWAWVEALGALAREVPPAQTADLAVLLHEPEGAAAATRDEAAADRFRTHRAFAAWLTAASAGRPLAVLLDDLHRADGETLALLEAAAAVTGVPLLTIACYRPAEVTDRLGKTLAQLAPRLPHRIALGGLSARDVATLVDAVCRKPVDRATVATITARTGGNPFYVWESARLLDSEGALVALSEVPQGVRDVLRRRLALLPDAALAVVRLAAAVGVEADVALLVEASDTDEETVLEGLDAALAADLLTEAGPGRVGFVHALVRDTVYTDLSGVRRSRLHDRIARTLHRQRPDDLAALAHHFARSGSAVNAPLAVEYALGAAGLAERRYAHDVAVGLIAQALDVHSAATADPYADPDTTLALLMRLLGAQLRAGATAAARRTRQQAVDLAVRAHRDDLVAAVYGAWTEPSPWRSRLEGFIDRTALARLERLARDHSLDGATRARVLQVLADAVAGEDSERARAAAGAQLALARSAGGPRLLASAVMTSAKLLPYELQGATRPALVAELRALAAEHDLPAHRWVCEHLDAVAAAVRNEPAAVHRHTTEGLDLAHRYGMLWALGINVTTLAMLAAIAGRFTEAEERYAQADELFQRVGAHHATGPRTLGLWTIRFTQGRTAEIAQSVREVHEAVGAPVAVAHALVLARQGRLDEARDVRFPPQPMTDHLYGVELDYRSELAVLHADTDSAALLVEHLRPVRDQFAGAANAAYATRPLAHPLADLHLLLGEERAAADAYALAERVALAWNAPHHAAAARRAAADMAAVRDRRRTFAL

SEQ ID NO: 4391 - protein, 1104 aa, synthetic construct; identical to SEQ ID NO: 4390
  REGION 1..1104: note = TnsF-Tn7 System Protein

SEQ ID NO: 4392 - protein, 975 aa, synthetic construct
  REGION 1..975: note = TnsF-Tn7 System Protein
MGRRESPLDPGAGPVQRFAHQLRALRQTAGGMTYRAMAERVEYSAPTLSEAAAGERLPSLPVVLAYVAVCGGDPEEWERRWQQALEEAVQPPQDDAAGAPYSGLARFEPDDRDRFFGRDRLIADLVQLAGAHRFVGVVGTSGSGKSSLLRAGLIPALRIDRPSQDRPAAIRILTPGEHPATEHAHAFIPVEGDADTWVVVDQFEEVYTLCQDATERDRFIGLLLGALDPGRRLRVVIAVRADFYGHCVDHRALADALQKAHLLVRPMSAEELREVIVKPATAHGLTLERVLTARIIADVDGQPGALPMMSHALLETWRRRRGKTLTLQAYEAAGGVLGAIAGTAEHVYTNLSSEQAAFARRLLLRLITPGEGAQDSRRPARRTELAGRGAEGDDAALVLDHLARARLVTLDDGTVDLAHEALITAWPRLRTWINEDRELLHHHRRLTEAATTWQELNRDPGVLYRGSRLASAAQLTRISLSSGEQEFLEASLAAQAADHTAATRSARHRRQAVVILSVLLLLTGTTTVWALREQRAAERQRDVAVSRELAVRSDALLSQRPEAAMLLALEGFRQASTVEARGSLLSAYGMYQATEFTGHTASVETVDFGPDGRTLATAGADHSVKLRNTTTEQLLRTLRGHTDTVTAVAFSPDGRTLATTGADHSVKLWNTTTGRETATLTGHTGSVNAVAFSPDGRILATGGSDGTTRLWNMSTHRTVARLAGHDRAVRAVVFSPDGRGAATAGADGTVRMWDVTSRRTTAVLTGHTDAPYIRWAGARHLARAGLTIEHPPSQLPGHFQIEEDHYEELRRCLNDPALPSDVRIAAALIRLYALPLTRIVELTTDHLHHDADRTYLTIIRHPVVLPPKLARLIDDHVEEGSRHGNEATRFLLPGRAPGRPRNPAGLSDKLKRYGLPARAARNTAMMQALADLPPVVLSDLIGIQPRTADRFAAMAGENWSDYLAAAHPRPRPEIH

SEQ ID NO: 4393 - protein, 270 aa, synthetic construct
  REGION 1..270: note = TnsF-Tn7 System Protein
MIEKLQAHYGFERMPFGRNLAPGMLHRHESHNQAVARISWCIAERSIGEVTGEVGAGKTVSVRTCLDALDPSKYSVIYIPNPMIGVRGIHEQIVNAFGQTPAHLGSRLTVQTGRALLSEREERGRTPVLVVDEAHLMSYEQLESIRMLTNQGMDQDSPLSCLLVGQPTLRRTMKLAVLAALEQRTALRYTMPGMTSKETASYVNHHLKIAGRPDQLFTEDALNLVHTTSRGYPRAVNNLSLQALVAAFATGKNLVDEAAARASVSEVVGD

SEQ ID NO: 4394 - protein, 270 aa, synthetic construct; identical to SEQ ID NO: 4393
  REGION 1..270: note = TnsF-Tn7 System Protein

SEQ ID NO: 4395 - protein, 462 aa, synthetic construct
  REGION 1..462: note = TnsF-Tn7 System Protein
MSQPNDEEARTERARRIGLFRYMLIREAADPSLTGRQRGALVRKLAQSEHIDADGRPVRITRWTLDRWILEWRQGGFDALVPSPRQSQPRTPPEVVELAMALKKENPDRTAAQVRRILRAQLGWAPDERTLQRMFHRTGLIALRAAKPTDTFGRFEADRPNELWVGDALHGPRIDGRKTYLFAFLDDHSRAVVGHRWGFSEDTVRLAAALRPALSARGVPQYIYVDNGSAFVDSWLLRACAKLGVKLVHSAPGRPEGRGKIERFFRTVNGEFTVEIASDKGEVGREIKDLAEMNRLFTAWVENVYHRRVHSETKAEPLARWMAGAPFPVPRPADLAEAFRWSEHRRVAKTATVSLHGNRYQVDPQLVGHKVELVFDPFDLTFLRVRLDGKDAGTAQPFQIERHSHPKARPEVPAEEEPARVTTGIDYLGLVDTAHSNHLGAKINYAALSDPPVEAVDLTDQG

SEQ ID NO: 4396 - protein, 975 aa, synthetic construct; identical to SEQ ID NO: 4392
  REGION 1..975: note = TnsF-Tn7 System Protein

SEQ ID NO: 4397 - protein, 175 aa, synthetic construct
  REGION 1..175: note = TnsF-Tn7 System Protein
MTENSEEVLADPVGMIVWLVSNVEKHLDADHVRDIVCNLVRSRAGRRNLAQALHDNPSLLRTGKPPAPFRVAKLLMALREAGARDTALPHCGECGRPRPYVGSRSGGRVVKPACPRCHGVKALSKLLDGQRVCRACFAKHAAVPCARCGAVREPATRDAAGQPLCPNCLIVTRSI

SEQ ID NO: 4398 - protein, 977 aa, synthetic construct
  REGION 1..977: note = TnsF-Tn7 System Protein
MRFGVLGPLRAQITGRDVRLDGPRQAKMLAALLVDANNVVAVERLVAVMWDGKAPATAVRQVQDALSGLRRNLAACGAPGSLISTRRGGYQIHLAPDQLDLLKFDHERSLAERHKAPFETAVALRRALACWRGNALVDISSRVLEFDAARLNEKRAATHKLCLSIELDLGRHREVIEELTILRREHPYDEHVAQHLMVALYRCQRQGEALQVYERLRQTLAGELGVDPTAPIQALHRRILVADPDLAASAPAAGPSDTRPESPGAAATEPDMAMPVRQLPLDVPDFVGRADALAEVARLLDASAPNPAPVAVIVGGPGVGKSCLVTHAARLASAAFPDGQLYLNLAGTSDEPRDPALMLAEALRALSIAGSAIPNSLSERAALYRSLLADRRMLVVLDDAGQADQVLPLLPGADGCAVLITSRTLLTHLPGARHIDLDVLSPAEARELFTGIVGRRRVEREPAEADAILDCCGNLPLAIRIASAKLTGRPAWTLRVLRERIEDESRRLAELRIGDLSVRASIELSLRLLPADAVRALSLLGLLGPYTLPGWVFGPLLDRSDAEEVLDTLVDASLVRLTATDAIGQPRYRLHDLIRTCAVEIAAQLPAADKRDAIVRVLSAWLDLAARGTDRLPAGLLVGEPGSAPRLSLPDAVVDRLMADPVGWFDVERDTLLGAVKLAVDWGLHELAWELTAGTVTYYDHRCLYQDWEHGHRLALEAAETAGNRRGASVLLRGLGQLHIYRDEFDGATRALQSSVELCQSSNDKRGQALSVAMLGTVSRVQGRYDEAADRVEQALALAVGEGDRHLEAQLSCSMAVMRLMHGELDEAESWFGQALRQAKALDDGHRVAVVLRRFSRLHDRRGNPDEALRCLRQALATFEELADERCAAYTLLEVGRVHAGRHDRDQASPALERAADLFHRHGDRQDEAACWQLIGDLDAAAGLHHLARQHHQRAQRLWQTIGNMHQTKAAAPPSSP

SEQ ID NO: 4399 - protein, 977 aa, synthetic construct; identical to SEQ ID NO: 4398
  REGION 1..977: note = TnsF-Tn7 System Protein

SEQ ID NO: 4400 - protein, 251 aa, synthetic construct
  REGION 1..251: note = TnsF-Tn7 System Protein
MTRHGQGFVRYIALDSRVGTDRYPFSLPVVARLAGMGRLDLDPTVTFLVGDNGSGKSTLIEALATAAGFNAEGGSRSFRFASRATESDLGDHLTVCWNRRPRTGFFLRAESFYNVATEIERLDEGSGELLHAYGGRSLHERSHGQSFLDLLHHRFGPNGLYVLDEPEAALSVQGCLAMMVRIRDLVQQGCQFVVATHSPILLAMPGARILQIESDGTIEQVEYEQAEPVALTRAFINHPVRFLDQMFAEEA

SEQ ID NO: 4401 - protein, 251 aa, synthetic construct; identical to SEQ ID NO: 4400
  REGION 1..251: note = TnsF-Tn7 System Protein

SEQ ID NO: 4402 - protein, 175 aa, synthetic construct; identical to SEQ ID NO: 4397
  REGION 1..175: note = TnsF-Tn7 System Protein

SEQ ID NO: 4403 - protein, 114 aa, synthetic construct
  REGION 1..114: note = TnsF-Tn7 System Protein
MAAKLDYHWHLRKSMADRGMFSTTDLMAPLKERGITLSSSQVYRLVVERPERLSLKILMALLDILDCTMDDLIEPIATAAAAKKPKKAAAGRASVTEGVGGLRPRRAQISGVDR

SEQ ID NO: 4404 - protein, 303 aa, synthetic construct
  REGION 1..303: note = TnsF-Tn7 System Protein
MPAGRGNICNECYWQNTLRKRIKMDMAGFAVPVMAKAFNEFGEWLLKEVGSQKAALTIHRYLPFFMEIEKRWKSIPAYSDLLAVFGAEGLRRVKLPMRWFKEAYCILPDAVAKGEDSDKRRIDAIMASIPGNTLAACALGNYRSILINRIKSKKTKLRSVRLALRPAASLLIATDDTGAKLPTQKAFDQYLRKSPGQKAAVTGFINHLNRSYGLSLVIKIEKKQVAKMQQKRLEKELIELLREVNDSDEFRRKWLSVALTYFHQLPRNAGAKLKDDHISIQENGGFVVVWKDQQYFIPHWDKP

SEQ ID NO: 4405 - protein, 303 aa, synthetic construct; identical to SEQ ID NO: 4404
  REGION 1..303: note = TnsF-Tn7 System Protein

SEQ ID NO: 4406 - protein, 231 aa, synthetic construct
  REGION 1..231: note = TnsF-Tn7 System Protein
MRNSCNSVKIIKQTRKIGPTRRSVSGIYVFRGETSIPFESTLERDFIIRKEFSLSVLDIIPQPVNIPYKIKNGRNSAYTPDFLVYYRLEDSDYENYPKPLLIEVKPEKEWRKHWREWLPKWKAAFSYAQEQGWAFHIHDESRIRDQAFENIKFLERYKRMQFPIEESRWVIENVKEMGMAPFHYIISRHFMGIYKAEGIAHIWHLLATRQLTCDISRPLNDFTELWSPDYE

SEQ ID NO: 4407 - protein, 642 aa, synthetic construct
  REGION 1..642: note = TnsF-Tn7 System Protein
MNEDDNDELSIEALEPVRRVMDLQVGSLVDSNNTIYRISQILDFNSVIGIEVETGRSAPLRIGDLRPVIDADDTHDMANMDLDEITDKDWEIAESKFAIIKPLLNLTMFGKSEIEQRAKEAKVDPSSIYRWVRQYKAYGCVSALISRKRGWTYGKSRLPVHAEKVIDEVIESFYLTPQRPTAQKAVMEVLRRCHQRGIEAPGAIAIRLRLRRIPEKIRLRNRGYKEKARNKYSPAAGRFPNADFPLAAVQIDHTPVDIILVDDLYRKPIGRPWITLAMDVYSRVVTGYYLSFDPPSETSVAMCVAHSILTKEEWMILHKVDAEWPVWGVPGTIHADNAGEFRSNNFRRSCQAYSIHLEFRPVRRPRYGAHIERLLGTLLHEIHDLPGTTFSSIKEREGYDAEKNAAMTKSEFESWLVTLIAKHYHHKKHSGIGMRPLRQWEIGIFGNAEVQGIGLPSKTADRHTVLLDFLPSFRRTVQTFGVTIDDMTYYSEALRPWINMEDQETGKKRFLRFRRDPRDISSVFFFDPDLKQYYKIPFADQSLPAMSIWEYRQARQKLKLEGMDSANDHQILEAITELRSRVDESMERSKKARRQAQRRKEHEKKISPAAPLAGQPQMPTAPSSIPMSDMVDEDLEPIGVIS

SEQ ID NO: 4408 - protein, 221 aa, synthetic construct
  REGION 1..221: note = TnsF-Tn7 System Protein
MPHPGEISLAHLGVLFLDELPEFKRNALEALRQPLEEGTITITRSSVTAGFPARFMLVAAMNPCPCGYFGDRVHSCRCSPQQIRQYQTKISGPLLDRIDLHIEVPSVKYRALTGKEEGESSAMVRERVDNARRLQKNRFGDSGIVTNARMSEKQIRSFCAIDEESHQLMEMAIEKLGLSARAMNRILKVSRTIADLEGREKIEPSHVAEAIQYRSLDRSIV

SEQ ID NO: 4409 - protein, 376 aa, synthetic construct
  REGION 1..376: note = TnsF-Tn7 System Protein
MATSYSWHPGTDRVTEPGIIPIPLLPDEIMSSWLTRAALFQGCDPLVLTGVLWPKWRAWTRDIDRGLDHERLIELSSVSGIDPKILRAACLRSILSAVISGSPDDLATWPWILALGTRNRKRLGGLQYCPICLAEDAKPYFRIQWRLAWHTCCDFHPTRLLDKCNRCGAPITPHCLSATDSDIVICAACKCDLRNTTASSLSKDALQFQRAADRTVKYRQGQYGTMNLSSVEWFTLSRHFMMILRKASSGKSEKLLAMLNMLGVGIETLKPTLTGLAFEMLPVSERSMLLESVWQIIQAEADRYLDAVSCSFLAKSSLGNGRHPVPSCIERICHAGLNPGVHHRRKKRVVIRKNRSKQAVLRMWARLQRKTQVSTK

SEQ ID NO: 4410 - protein, 296 aa, synthetic construct
  REGION 1..296: note = TnsF-Tn7 System Protein
MNTYEHIYPDFRHIMGLPDQERIRFMDQPRWITYTVAQQVMDTLQELLRKPERPRMPNLLIVGDPNNGKTTIVRRFRDLCGKGYVNEDSEPVKPVILAEAPPSADEKGLYISILERFFAPYRPTDPASKMRYQVIHLFRSCHVRMLIIDEFHSLLTGSPIKQREVMNAIKLLCNELAIPIVGVGTREAVRVLHTDPQHASRFDVISLPLWEANKEFQRLMTGFINILPLKKPSQINRPELAMLLHTISDGNIGNVHRLLIECATEAIKSGKEEIDKTIIEGKSWLRPTRGIRELIG

SEQ ID NO: 4411 - protein, 296 aa, synthetic construct; identical to SEQ ID NO: 4410
  REGION 1..296: note = TnsF-Tn7 System Protein

SEQ ID NO: 4412 - protein, 439 aa, synthetic construct
  REGION 1..439: note = TnsF-Tn7 System Protein
MFPVKDSAMLKKRIAKDVPCIRCGKKKYKNRKNTELGPVCNSCSIYFREPKKCSSCETKKRDVSNRNLNNGSTAVLCQSCYGRSEQVACSLCTRRQHEFFYDLSRKHICKNCLTLPPRYCKYCSVEIPAGSGHICRDCSFSRTLQRRMNYLSPLLNGEFQRIFNEFSQWLIARKGINYTAIKIGYYFQFIHELNDLANSLTTFPTYTDIVNRLSVARTRQFLLVTVFLSEIKVIKIDSKIRDEFSNLDMIDRYLNYFKQNSNFGRMINRYYNQLELKLKDGRTSIRSIRLALTPAMNFLKNCVHYSLNKPSQDVLRGFLWASPGQRAAITGFINFLNNSYGNDISLDSIPKTITFERPYLSTKMLKQRFIDILRESKVREIPDEQLLRTSIAYLHGVEIPEFVRLSRHDILKNKTGEYYLRLANENFYIIQPLTHKKHP

SEQ ID NO: 4413 - protein, 237 aa, synthetic construct
  REGION 1..237: note = TnsF-Tn7 System Protein
MKFSHKNRKIGYTYGSLSGVFSFRGEKSISFESSLERDLLRVLEFNESVIDVIEQPFTIEYINKNNRPTTYTPDFLVNFATSQSSWQTIPDPKPLIIEVKPRRKIIKDFDKLRPKFRVGLRFAKENDMNYRIYDESRIRTLEFKNINFLSQYKRREYDTFEEIRIIQHLKDIGHTSIDYLLAHLYVTKEERGIALAQIWHLISVKKLGCDIGRPLNQSTTIWLNIDQSYLEGVYYDD

SEQ ID NO: 4414 - protein, 629 aa, synthetic construct
  REGION 1..629: note = TnsF-Tn7 System Protein
MTTENDNGFKADRRKISFRLGEYVSNSGEIYKITQIINFDELVGISIKSGQASRLLITNLKAVSTPSQDKFDNKFIHRDLEDFSDNDWKEIERRFNLITPLVNGASKSEIVIHAKQQNVHYTTLYRWFKNYQETGTLTGLLPKKNGRKPNTLLVEPRVEAIIEQVINDIYLNNSRAPIDSVIKAIFLSCDEKNLNRPSESTIRRRINNQSEYHRTKRRNGSKQANTKFAPTPGEYVADYPLQVVQIDHTPVDLILVDDEFRLPIGRPFITVAIDIYSRMITGYYLSLEPPSTTSVAMCVAHSINPKDHWLLLHDVESTWPVWGFMTTIHTDNGAEFRSETLQRACLTHDINLEYRPVKSPNFGGHIERMIGTVMKSVHSIPGTTFSNIKEKAEYDSDGNACMTYSEFEKWLVTWITKVYHKRKHSTLGMTPEDKWNEGIFGSLHSEGIGYMPKPNNPETILIDFLPMVKRTVQKNGVNIDGLNYYDNVLRQFIRVIDKTTNKNKKFIFKQDPRDITYVWFYEPQEQKYYKIPLANQAIPKMTSWEFLAIKKRIKEKNYTFSEHSLITVYAEMREMVEESTKKTKKARRMSQKLKNNENQLVDIAIKPKLNTPVIEIDDDIWDEDIPEFD

SEQ ID NO: 4415 - protein, 357 aa, synthetic construct
  REGION 1..357: note = TnsF-Tn7 System Protein
MLNPIRLKPAEGEILSSFIIRTSIVTGTDPLGFSGAIWPNKRIWTADIDRAMSDEDLLLLSKATGVEIDTLKSLTLNHALSELFKTTPNTLAAWDWITPISSRNRSRVNGLHYCPDCIRNPTTYFRLNWRIAWNVACETHGNLLSISCPKCNTVISPHLINYHSTDLTSCIKCQYDLTTVEQTMASPKVIKLQKLLNDAMNNKKVSYPWDISDKIEFFATINALTSFIHKTRSVKALAEKLFNSLGTIDSNLTLPPNSKIRFINQPVSERHFILFNCAVLLDMPLNDVRELFREINLRPSLLIQKSSHYFSETFDSIYRSLEKNTHERSKSSKSSKPIKPRTKDEVDKLWNEVQCFL

SEQ ID NO: 4416 - protein, 306 aa, synthetic construct
  REGION 1..306: note = TnsF-Tn7 System Protein
MTINTDHLHESLTNIIHQSKEERIRFLDNDIWINHHISNEILQLLNKLLHQPKKQRMQSLLIIAEPNMGKSSLIAQFSLLHPNTTIEDDEGMSSAHCPVLLIDAPTTADEKGLFIAILEQMWAPFRPNDTPAKLKHQAKHILRECNVRMIIIDEIHNLLSTTPVKQRQIMNTLKTTLSNELKIPIVGVGTSDAAIILTNDPQHASRFDTVVIPKWGMDKNFRGLLAAFEKRFPLKKPSNLASKDKAPLLLAFSGGNIGDLHRLLKECCAYAIEHDIEEITVDIINKFKWVKPTNTRLSRQIVFDNA

SEQ ID NO: 4417 - protein, 306 aa, synthetic construct; identical to SEQ ID NO: 4416
  REGION 1..306: note = TnsF-Tn7 System Protein

SEQ ID NO: 4418 - protein, 311 aa, synthetic construct
  REGION 1..311: note = TnsF-Tn7 System Protein
MPAGRGRECEDCGWTKTFEKRLAINLHGFSSDQFEQLFSRFGRWVSERIGPSKAAMKINGFYRFFRSIEKRWGGIPSYDEMLKHYTAIGLRRAETPMRWLSEIGAISVNAEDRETRTEERRLDTILAEIEDPWSQQLLMGYFTALSARRESGETDLRSIRLALRPAANLLKIARLAVGALPTQKALESFWRGSPGHVAALSGFIGYLNKSYELQLKWRPSDAWLAKAKKDKAERELVALLKQENQQASDFEVRWVVKGLAYFHNIRRASQKTLVYKKESYQGVDGFSVDHAGEKLWVPSVSSYDRGRVIVG

SEQ ID NO: 4419 - protein, 325 aa, synthetic construct
  REGION 1..325: note = TnsF-Tn7 System Protein
MTLGELLCRGRWINQGRTFICLDLIGSSEPLGQQIEWQRKQVDTSAGVDGGNVLLPRPITTLAAEEFLAEESNIEPDRHAETKIIKARIFKRLGQKRSLIKIKRAVQANRGRMGPKPPKAETYSSGTGTGSGKNTGKIEHISEIELESHGFLRDIWNAFKTIQAANLEIVSELSWYTPNHGFRNQSDPQVILIPPADDHPDSKVRAWVYLDRETYQRRGLMVLKMKIDGVDYFCFEVQRKEAEEGGMIQGHAGLLMKSSMCTQEEITGLVEDVRSRIRYAIGSFKNIRSTFPEQTKIFNHIQKDQKIIYRKTLINAFKELGVELT

SEQ ID NO: 4420 - protein, 311 aa, synthetic construct; identical to SEQ ID NO: 4418
  REGION 1..311: note = TnsF-Tn7 System Protein

SEQ ID NO: 4421 - protein, 330 aa, synthetic construct
  REGION 1..330: note = TnsF-Tn7 System Protein
MRCKLCSTQGTSLCLTCNGVMPAGKGKECEGCGWDRHFKHRATVYKECFEHELVRERFAEFCDWLKPQMGGHKATLRLKSYVPFFLFLDEHPSKNPTYVALLEHFNAEGLRRMQTPMLWLKERYNIEADKATREEHSDRRRIDELIASVPSSLGATTLSGYQASLMSKYLKGRTTIRSVRLSMRAAKNLLETASVDFKALPTQDSVEKFLIQTPGQKAAVQGFISYLNHSYGLSLRPQVNERAVSRARVQKLEATLLAMYTAKGEGDAFNRQWIKSALMLLHGLPKVNKKSLSYSVLAFKGEPGFNVSFNAKTYWVPAPQAQPDWLHKPS

SEQ ID NO: 4422 - protein, 590 aa, synthetic construct
  REGION 1..590: note = TnsF-Tn7 System Protein
MSTRLQRSPPRQHLCTTNDGEAISHINGTAVVWWYERAYRNDHAQSIPVVDVVFRFLDKFDQLSGITKVKIGMGRLGSFRIGTLWKNGRCVAETDFGDDQEFTVDFTRDAWTHLSLKGNHDYPFFKKDYELPHSNSPEVLSELLNFPLPDGKNLLIPCMEFLYRCYGSTSDMARILATYSWPEVQEKLYASLEHDAKTWLVQPKRHIPEADALFLASVQYDPYAECAARNIHAQLDNAHGLGMAGRSLKVSPWFQELARVKGRGCWINGGKTFLCLEVTGLSQPQQNAYELRLETRGHLDITAGTPAVNLHKSIENIVKPDDQFPVTDEEEPGYGASCWSKQDPCFEILGPKCAHKKVYVQRNYSEIKNVQIPEGSATRASTGDPNGPRNDVCRIVHHATRVEGDGGILQAIWNELRRLKTQIQAFSSLAWYCSAKMDFVETPVFRLHKLPSFREGFTVPDAARTWLFYRENPTKIRGILIVRLVIHQRTFYLFENQRKKKLRGNAYHEEKVSGLLMNIDDPQKARETISMICDRIRYAEGRFGRLKNLETPHKVFRHYPQKYTYAAALTVQKSFESLGIDFSKEHQITD

SEQ ID NO: 4423 - protein, 330 aa, synthetic construct; identical to SEQ ID NO: 4421
  REGION 1..330: note = TnsF-Tn7 System Protein

SEQ ID NO: 4424 - protein, 222 aa, synthetic construct
  REGION 1..222: note = TnsF-Tn7 System Protein
MDRNSCNQPPFSVARSIKSASRSLCGVFAFRGGSVAFESSLERDFLRRMDFRTDVLDVVSQPLSLNFTARNGRLYTYTPDYLVTFHSHVELRPMLVEVKPEDTWREHWRDFLPKWKAAWRYAQQREWDFHIYDESRIRGQSLKNIQTLERYRQADYDAVDLNAIIETVALKGIATMQYLVALHFQGQEALGQSHVLHLIAIRQLDCDITGTLNGSLEVVLAS

SEQ ID NO: 4425 - protein, 640 aa, synthetic construct
  REGION 1..640: note = TnsF-Tn7 System Protein
MKDAKATQSRGIKNDRSFVKINVGELVCHRRAVYRITQVLDFSTVVGLEVEAGKYEVLRIAELQPFLGDKLPGLYADYDLEDIGAEDWAIAQRRYALIQPLLRSEGHSRQVVEGIAKEAKVDAVTVYRWLRRYKDQGDLFALVPMRRGWGKGRSRISEDVEKVIQDVLNEYYLTDRRPDIASTTKEIRKKCRSLKLTQPAVNTVQARIQRIPERMRLMKRGDIELAKSKHDARPGSLNTEYPLQIVQIDHSPIDMIIVDDVHRRPIGRPWLTVAICVYSRMVVGYYLSLEAPSALSVAMCVVHAILPKDRWLLQHGIEGQWPVWGKMTTLHSDNGRDFKTANLIRSLNVHGINKEFRPKMEKHWGGHIERFINSNSRHSKKDKGATFSNPLERREYKSEEEAIYTFSELEARLVRNILKYHEEYHSELDMAPIRKWNLAFFGEKYHSPLMPLPAMVSDAWAFQLDFLPATYRAIHPYGVEWDAMYFAEALRPWIGVTDLETKETRKFLFRRDPRDINRIWFKDPDLNEYFEIPVLRKRYEGLSVAGYVAAKKKAKTEGRGAINHEVVDRIVDENKQQEIEAAQKTKQARKNLQKTTNNTKLSTPARPAPERPSVVAPKTNAALLSEMLSEDDVDEFGGVS

SEQ ID NO: 4426 - protein, 341 aa, synthetic construct
  REGION 1..341: note = TnsF-Tn7 System Protein
MSSWLVRCALCHGCEPVTLTTDVWPDFRIWCLDPDRKLSKEHLIALSRRAGMTIESLDASTLRPLQQKMTGTAFFQKGIAAWFLCLGVRNRRRSGGLQYCPQCFAEEVPHYLIQDRLAWHTVCSIHHVGLLDHCECCHAPLCPQLLSPPELDLGRCHRCGYELRLASPGGVEEDALRFQLATDALFFAVPQFYGQQRLALNQWLALAKWMIGVLRAGASAHSSCTNSFFEGLGVSHKNLVSPSTGLAFEYLPPSERGILLANVWRMIQAGPEQLLKLARRDDIRPSLLIPRTASLPTALAGLRSVLKPQRQNHDVKNHTEQPLSPDRVLMRWQRLLRKFER

SEQ ID NO: 4427 - protein, 297 aa, synthetic construct
  REGION 1..297: note = TnsF-Tn7 System Protein
MTEYDHISSLFKEVMYKSDSERIEFMDHPRWIEYKAGQTLLDLLHGLLRKPERPRMPNLFFVGDSNSGKTTLIDRFIEAAGMPYLSDDAVSVRPVLAIEVHKPDERELYTAILRKFFTPHNPAAPIAKLRQQAIHLLRGARTRMLIVDEAHTINNGSPAKRMDVMNELKMLSNLLRIPLVLVGTRTALQLLVLDAQYASRFEVVSLPAWSANADLQRFLKSFESVLPLKKPSKLYSPELTALIHAISNGNTGNIEYLLRLCAKEAIEKGSEIIDRKLLEKNQWLRPTRTDGVRERIL

SEQ ID NO: 4428 - protein, 297 aa, synthetic construct; identical to SEQ ID NO: 4427
  REGION 1..297: note = TnsF-Tn7 System Protein

SEQ ID NO: 4429 - protein, 665 aa, synthetic construct
  REGION 1..665: note = TnsF-Tn7 System Protein
MTGRPEPPAPDDPVDALLDLLAGLEPALAREALLAAVNRAAARPDGHRRLAQAIVSQPDLLTGQGARAETPSVLRLIDALAEAGARAVVVPSCPRCGRGKQLGPPIEGVRLCHGCGPKARAVACGRCGKIRPTARRNDNGQPLCQNCWHQDPRSWKPCVSCGNNRRIAAVTEAGPVCQSCRPGHDLPCSFCGSTSSRVGISRAIGKPVCERCRKRWIVCSNCGTGAMLKGGTLDEPLCARCLNPDPTFWKRCAVCQTTWQLSTAECARCSLDRKLTELFTSPAGATPRELDQLREALVQADRPDSVDTWLTRPGVSTTLRELASGHRRLSHELIDTMPAGLTLKLLRSMLVTAGALPDRDERLTALQGWIDQTIAARTVPEHHRILHGYAVWHHLRRLRGRLNSQPVSHQQARNVRQHVTAAAAVLDWLEARELTLATCTQAHLDLWLTDHTQSHRDRSANFVRWAVVHRHAFRLTAPSTRWHAPSGPLDQDRRWDDARRLLHDETCPTADRAAGLLIILYAQKLTDITALTINHVHQRDGHTFLYLGSRPIALPTPLDDLVNELVAIRKPRGGGVLNPESAWLFPGRWSERPLTEGALARRLHELGLNPRQDRNTALFALAAELPAAILAKTLGINIKGAIQWQKIAAGDWSTYAADLSQRPRT

SEQ ID NO: 4430 - protein, 665 aa, synthetic construct; identical to SEQ ID NO: 4429
  REGION 1..665: note = TnsF-Tn7 System Protein

SEQ ID NO: 4431 - protein, 824 aa, synthetic construct
  REGION 1..824: note = TnsF-Tn7 System Protein
MFRWLVRLMAGLTPGQARADIALDSEASGDATVINQGHGVINIHHPDPAPETPISIAVPQYAETRLRGRDELLARLTGAWSSPDSRVRILYGLGGCGKTTIVAELARRVSETVDVWWLSAADEDQWQSGIRALAQELGMGPVELQQGRRADELWKRLHAHRQQWLLIIDGADDLNVLTIEDRLRHGRGWLRPVHANSKGLVVVTTRDQGEEWPEDWCLRHRVPVLPTRHAAQVLMDYTKGRAGKRSEAAILADRLGGLPLALKLAGAYLAESTKRFRAAYAKPGAITSFAAYVTAVDTGKLDLGQPERKELSPKEARQLIRQTWELSLSLLDQREVPEARPILRLLACFADAPIPYQLLIRPELLRGTDIFPGLQDEHMAEVLACLEDFGLIDVLPDPVDEDAADTVRTVKLHVLVRDASRANAGVGIGRDERGFLALGRWLLSVAARNPEVATPEDPASWPLWGMLGPHCLEWLEAVAVGNEAHAAHEAAEVGLMTVHYLGARGSYALAEERLREVLAVQSGARGADQAQTLTIQHEMAGLIGVRGRYEEAEALFREVLANREAVLGAAHPDTLITRYELARILGIRGDYAEAERLFREVAAARATALGPEEPKTISASHGVAWVIGEMGRYAEAETLFRDVMVRRTHVLGSQDPHTLTTGYEVARMVLLQERYEDAEQLFRQLSKDLHDLLVNATGLPDRGAAQMTFRDLFSPRAALLGAERLDTLNLGPGPGRGQALEAAVTLVETLRIACEHILTADHPHTLHVRTWIAWLWSRQGQTWKARREYKAVLEARKWVLGEQHPATVRTEEELRRLSLSPDRN

SEQ ID NO: 4432 - protein, 824 aa, synthetic construct; identical to SEQ ID NO: 4431
  REGION 1..824: note = TnsF-Tn7 System Protein

SEQ ID NO: 4433 - protein, 353 aa, synthetic construct
  REGION 1..353: note = TnsF-Tn7 System Protein
MTLLRPEEAMFDAMLRGWRAQQKSRGLRDETVEDREKLIRRFHEYTDEFPWQWSPAHMDEWSAYLTSERHLAPSTIRAYQGDVRLFTEFLIDARYGWVSACEEEFGTFPVAICHEWNTRVHLNDYEGSPEARPFTRAELQRFLDYADDQVERAVRSGRKGTLAAYRDATIFKTIYGWGLRRTETSKLDLVDWGRNPKAPHFGRYGILNVRYGKAKRGQPPRRRNVLSVMDWAVEAVADYVENVRPRFGYPDHPALWLTERGGRVKPSEINARFVAYRDALGLPKELTPHSERHAYVTHLTEDGVDRRFIQQQVGHECDSSTAIYTHVSDDFMNTALTRALAPAFAGGRGGDRE

SEQ ID NO: 4434 - protein, 114 aa, synthetic construct
  REGION 1..114: note = TnsF-Tn7 System Protein
MNGKLDYRWHLRKVMADRGMFSTTDLLAPLAERGITLSTSQVYRLVVERPERLSLKILMALLDTLDCTMDDLIEPIAAAIPSTRPKKAAAGGITTTDSIGDLRPKRARITGTTP

SEQ ID NO: 4435 - protein, 657 aa, synthetic construct
  REGION 1..657: note = TnsF-Tn7 System Protein
MNTSSREAPGNLAGIIRACQAVVPGLPESAIIATTHEAGGPKALTRLARDLAATPDLLVSGRSNASPTAQRLIRSLRAQGFQQFQVPRCAGCGRAVKLSHRDGRGGKLCDRCVCAARTRTCSACGGKHPGGYRLIAGRPFCPPCFTRDPRSHETCSRCGTMAVPQTRDEAGPICPRCYTAPAVPCAVCGRHRPAAARHDGRPLCTSCHDGLRHRPRTCAGCGHRRISPHLREQGPICPQCADTHGAGRCAVCGDDEHRLYGRLCARCMVPGKLRALISDDHGRPHPQLLGLEKYLLRDEGNAEAVLSWIRRSPMSRVVHDMAVETTPISLQAVAELRATGATGYLAALLMESGAVPTQNFDRIRLEVWEQEFFATIPDSGTRILLHRYAAWVINPRFADPPHSSAADDNSRLSTSKTHLKAVAQFLEILQTQGWNLGTMPQRLFDDYVAAHGRTGKDLTPFIRWARSQHLTRLRSEYLQSGPGGSVVSENQRWDWVADLLSTDELKLAWRVGGLLVLLYGATLTRLVSLRHEVVDWEENTTRITLGTNPIELPVPVGALVRQLLDAGPIPSGNESPWLFPGARPGRHLTTAALSAPLAKRGINLRDGRSTALITLARDVPPSVLADLLGLSIDAATRWSALGGRDWIDYPRIRLLDT

SEQ ID NO: 4436 - protein, 348 aa, synthetic construct
  REGION 1..348: note = TnsF-Tn7 System Protein
MLRPEESVFHSMLGSWGQQQRSRGLAEDTIKDRESTVRRFVDFAGSYPWRWQASDLDEYTSLLRSKGLAVSTIRHMHGVLSVFCDYLIDPAYDWVEICDSCFGDTPSQICLPWNTTRHVQDYEGNPARRALTFEELQRFFNHADSKVEAAVAQGRKGALAALRDAQMFKTAYAFGLRRAELRGLDLADLHFNAKVPQWGRYAALHVRWGKASKGSTPKRRTVLLVPELAWWIEGMRQWVEQGRALFPAGELAMMWPTERGSRVSLEYIDRRFTALRRELGLDPALKLHCLRHSYVTHLIEYGYADRFVQEQVGHQHASTTSIYTSVSGDFKNRILADALRRFTTLEGS

SEQ ID NO: 4437 - protein, 112 aa, synthetic construct
  REGION 1..112: note = TnsF-Tn7 System Protein
MSTRVETLWHLRRIMAEHGLFKTTELIPLLEQYGVHLSREQVFRLVTQKPERANLSVIAAVCAALGCTPSDLIEVRIVEEKAVAVEQTRTSLGTLRPVPARIHRPPQTPPER

SEQ ID NO: 4438 - protein, 500 aa, synthetic construct
  REGION 1..500: note = TnsF-Tn7 System Protein
MGVDKKGVRYCDGCGRAIQKVTRIYKGSDFCAACYRRTFVSLPCSRCHTPVRAHKNAGEPPVCKACHRASRACSRCGKAVPGKAGRVIGERVICAACAPYFGRPNPCERCGKLTTRLSKAPSLGIEERICSSCRQRLTHRTCSRCRKYRPLAELAADGAPVCAACATDPTIGHPCPVCGVAVRGSGSSRCRACVNLERLTREARLQALTLERDWAQQLLLDFSGWLYRRSGSAPNLCRKFLAHVELLQRIDATYRTENDLSPQSLLQAFGSKLLRKHLLVTQFLQSRLGLAIPTARRKAFSDRDLIDETLRDSRSSPWGPVLSGYVRWLEREPLSVRTLRMYVRVAAKLCDAEALSLSAPLSDRGLARFLSRHPGMRNNVTRFVTYGATRLGWSVAMPAKTSARSSAGARRRLERFRFLFQSIAAKGVERAAYAELTKLLSYAFVVPNHVLRERFWFLEEASDSMVLRSAEDRFKIPRPLWEFSKRWMALKNNNFVTPVV

SEQ ID NO: 4439 - protein, 395 aa, synthetic construct
  REGION 1..395: note = TnsF-Tn7 System Protein
MYIIPRSVIFRCFYGPNSAIANAFCKGPWQEASHEVIYYWPLESGLETRLNHEEKTWDIILQPKIDSQYAPLLAAQIFDPYAKSCAESIYTNIIRERGAKNNEPWFAAAKIPFDTSQESLRLRIKGFYLKTLGKGPRKFLVTGITEADFPRYFPKIRWEKANSGEQGANITPVDEPAPYQNGTRIRPAPAGIVGFSDEDFAVEEGALLVPADDFAWAQAPTMEKLVKQSSKQYNAPEAHRFFQPTLENVSSGSATHRKSGLAEAQVETAIRRDRSQQFMNLLESFDALQASDVIERWSIFGPTDRAMLASRHGLPCWNFLDEDARVTGKWPRRSWRLLDPAPKDKDGAIGVPRCALVIQISMENITGFWIEIEVRPNGAEGFLSPFVVTQENPMK

SEQ ID NO: 4440 - protein, 197 aa, synthetic construct
  REGION 1..197: note = TnsF-Tn7 System Protein
MAVDDGSVAFESSLERDWLVVLDFDIAVTALREQPFTIGYDSPEGRRRYTPDALATFLREAGRTETVVYEVKPREELKTNWRLYENRFRAATRYCKRKGWCFRIVTEREIRTPLLENAKFFRRYRNLERNPLTCDQLLFTLKALGETTPQALLAAAYWTEETRMAALPMLWKLVAEREILTDFQRSLTMASPIRPGG

SEQ ID NO: 4441 - protein, 340 aa, synthetic construct
  REGION 1..340: note = TnsF-Tn7 System Protein
MTSYLARTAHLHGLNAYRFFAFHLPDLPIWNRDFDRTASSEGLKRVAALLGVSEEEVVAMTLKPYARHLAGDGTGDGAVQPWVNAAGIYHRVRRRHALQFCPRCLQAEPAFKRFWRLSFVVACDRHRCLLRDACAVCGAPVVPHRANVSIVGCYHCGSRLPKAPVEPHPFAVDQVLTVQSRLLDAVKSGVFDLRSTTIRATEFFRGLRMLLLLARERIRFTPQAAPELCGLPPYRLELMRAYDRVAIIALIGRHLLADFDALAAFLGNLGMTRAQFLRFGRLPDWLWDAVLSLPPGRAPRRSSARSLQRELVRIRAERSPGWRDRHAQLLMDWVGATHGR

SEQ ID NO: 4442 - protein, 668 aa, synthetic construct
  REGION 1..668: note = TnsF-Tn7 System Protein
MISLPILERLRVDGYGLYPGQDKNHRLDIELKPGLTLILGANGLGKTTLINLMFRLLTGPFDLSVRSGAPLGTASLQATALSSDKRQELAQRVRDRAKSASGALTFALGRSKITVTRLLRNLQILELMIDGIKIEPASEAIYSDHICKEAGVYAFGDFLLLLRQLVFFFEDRRALVWDSHAQTQILRALLLDPEKAKKWSELERAALSLDSDLRNTQSVMNRRERIIDDTSQKMANASSVRVEIEGEEEIQQADIKRQESLGERAAELDSSISRYRLDLLRAEHAADEAQRNVERAQLSVIERAFPSIDQNMRYIFAQLVSDGLCRACGQLSQAAVERMQRNLTEKRCAVCDLPLPGGNVVSAGELTTKRIEITREEAEKARQQLRSAQRIYHETTEDYNAVQKELAQLSDAIQQRSRTLKSLTSQLPPEEAAQRETRQAVEALKTNVESLRAQLAVAQKAYSEFVEAQKQRIHAIAEDLKVAFNEYAKGFLLEKVTLTWTPALRRMGQFSSNPLIEFPAFGVDIAGGDFQEPVRRDGPEQVSESQREFIDLAFRMALIKVVATDQAGTLVIDAPESSLDAVFVKRAASVLGHFALATNSNRLIVASNILSGDLLPEMICKSSTGNCQPQIVDLFDLGVPTAAIRQFQDEYKEVRDQLHQKISASNKT

SEQ ID NO: 4443 - protein, 668 aa, synthetic construct; identical to SEQ ID NO: 4442
  REGION 1..668: note = TnsF-Tn7 System Protein

SEQ ID NO: 4444 - protein, 295 aa, synthetic construct
  REGION 1..295: note = TnsF-Tn7 System Protein
MSRFQHLDASVVEALDLPKPARVAFCQADRWIGYTRATQILSQLDQLVGYPKTLRMPNVLVVGRSGNGKSSILERFTHRHPVQETAAGSPIAPVLLVEMPETPDESKLWSTVLWGLSISHREKDPAALKKRSVKSAMHYAQVRILAIDEFNNLVNAGRAAGDLLAAIKGLSNELKISVVAAGTQSAINALNSDPQMKSRFEPAVLDRWKLDGEYLRFLASYERLLPLAEPSGLATRELAPKLYGMTGDTLGATVKLLKQAAVSAIESGKERIDAKLLDQVPWVRPGEWDEVARRV

SEQ ID NO: 4445 - protein, 295 aa, synthetic construct; identical to SEQ ID NO: 4444
  REGION 1..295: note = TnsF-Tn7 System Protein

SEQ ID NO: 4446 - protein, 765 aa, synthetic construct
  REGION 1..765: note = TnsF-Tn7 System Protein
MRLRPEAIRKQRELAHARARLIAYLQRVVGPALTSEDAQAALEKAKAWNPGPARTLDDYFAEHPNALTEPSPHSPAPVVRLLQHLEATGHGDAVTQLACARCHRTGLRLTRNTPEGRCCDWCVARTELRPCARCGRDGHIVTRREEGPICRLCYYTDPQVVEECAECGRIRKPVRRREDGASLCQGCAPKPEHACVRCGKLRPTHAITGDGPVCQNCYDSPPRLCDLCQQIKPISVRKAEGQPAICGDCYRGPKRTCVVCGRVRHGFQRRGGEFHCASCRPRRSLPCADCGRTKPVQANWPVGPLCQPCYLRRRRFPAPCGQCGTLRVLVGRSEDGKSICGPCSGTDIDFACRRCGYPGDIYADGSCSRCVAKDRVRDLLSDEDGTIHPQLQPLAEQLGAAQEPWSVITWTRRSDSARMLAALAAEHQEITHEILDELPQDWRTLYVRELLVAADVLPKRQENFARLRLWLNEALTDLPPHHARVVRPFAEWGVLRDARRRADKGRYTAGAAANDRVDIRAAIKFMAWLDDNSITLADLSQEVLDLWLTTNPTQARGISAFIRWSVARRLTGKVTVPTRRHGLPSRFMHSDELNQQLRRCLNDDSLPLEARIIGSLTSLYALPTTRIVELTTDRFQRDGDDAHLTIDRHPVLLPPRLAVLIEKQIASPSCRTSVLQQPHDGTPGFLFPGRPPSRPRSADSVHSYMRKHGLPGISARNTAMMEAITDLPPIVVSDLFGMHPHTAYAWSQYAQNSWAEYLEVAQAIE

SEQ ID NO: 4447 - protein, 765 aa, synthetic construct; identical to SEQ ID NO: 4446
  REGION 1..765: note = TnsF-Tn7 System Protein

SEQ ID NO: 4448 - protein, 539 aa, synthetic construct
  REGION 1..539: note = TnsF-Tn7 System Protein
MGFARTCSVALVGVEGVVVEVQADLEPGVAAFTLVGLPDKSLTESRDRVRAAVVNSGAEWPQKKLTVGLSPASVPKSGSGFDMAVAAAVLGAAERIDPRVLADIVMIGELGLDGRVRPVRGILPAVLAAAEAGYEQVVVPECAAAEASLVPGVSVLGVRSLRQLIAVLADEPVPEEAQDEPGRPDPLLAGLRMPGTGAATGMYGMGAAQHEHDLADVVGQESARTAVEVAAAGGHHLFLEGPPGAGKTMLAERLPAILPRLCRAESLEVTAVHSVAGLLPPGRPLIDVAPYCAPHHSATMQALVGGGAGFARPGAVSLAHRGVLFLDETPEFSSHALDALRQPLESGHVVIARSAGVVRFPARFLMVLAANPCPCGRFSQKEDLCECPPSAIRRYQGRVSGPLLDRVDLRVEVERVTRSQLTGTGSRGDATTVVADRVLAARERAATRLTGTPWRSNSEVPGRELRSRWYAAPGALEDAERSLERGVLTARGLDRVLRVAWTVADLVGHDRPDGTDVALALQLRTGVPRGVPMALGASR

SEQ ID NO: 4449 - protein, 539 aa, synthetic construct; identical to SEQ ID NO: 4448
  REGION 1..539: note = TnsF-Tn7 System Protein

SEQ ID NO: 4450 - protein, 342 aa, synthetic construct
  REGION 1..342: note = TnsF-Tn7 System Protein
MKEGWARQQSARFLKASTIDPRLRVIERLEEFTGQYPWQWTPAEGEAFIAHLRSGKKPIQLSTARTYEVTIELFLEYLLDSRYGWIDACLERFGEVPQQVFHEGNSVLHTVEYEGDPRRRPLTYDEVQALFDAADARPAKIRGQGRKGALTALRDAAVLKTIYAYGTRRTESSKVDLVDLRRSRKAPQFRGYGSMMVRFGKAQKGSPPKRRSVLMVPEMDWAVDILDEWVTEIRPHFTPGRHPALWVTERVGRISPRSINDAFVTARKDAGLDEDLDLHCLRHSYITHLTEFGYPARFVQEQVGHSHASTTAIYMGVSNEYRNTLLEASMKNRLGDDWDVIS

SEQ ID NO: 4451 - protein, 108 aa, synthetic construct
  REGION 1..108: note = TnsF-Tn7 System Protein
MIKKMGYQWQLRQLMAERQMFQTSDLVPLLAERGVTLSREQVYRLVTQPPQRMSMDTLVALCDILQCTPNDLIKPEVVNVQLRKTADGDATPLPLKPRRTVIRRPGQS

SEQ ID NO: 4452 - protein, 589 aa, synthetic construct
  REGION 1..589: note = TnsF-Tn7 System Protein
MSRRVGRCAGCGRDGQIGGRRPDGAQVCGSCYRAYKPKHRCDACGELRFPAVKAGGRSGSDKTLCSICYRTARPKRLCDGCGQLRIINSGRADHGEPALCVTCYPRIQAKVTCSDCGELAPPVVVPGGRTDTTRILCSRCYARPHRPCGVCGRSRRVALKATDINPDICPTCYQAPEVSCAICGRRDRGRHTGIGGAPACFSCMLADRIDALLTGPDGAIAGTLVPLREAILATNNAQAALSNLGRSRAHDVLAEIAAGRAPLAHATLDQHGSSRSIDHLRGLLVAAHALPARDEHLVRLEAFARTIADSVDPDDRTIIALYARSHVLRRLRRHLNGSALQPGAAYRARAELASSIRFLAHLRRRGRTLATCRQIDLDAWLANPRHANSTRSFWSWAIKTRNLPPLEIPVTINTEPSQFTPDDHRWAQARRLLTEDTLPTADRVAGLLVLLFAQQVSRIARLTRSHIHHRSDRVTELSLGATNVVLPGPLADLISQLPTPRSDGTARYLHDGTWLFPGRRPGHPLHPTSLSRRLTELGIDPRPDRNSALLDYARQLPPPVIGRLLGLAPGTVDRWATISGGRWARYRPT

SEQ ID NO: 4453 - protein, 213 aa, synthetic construct
  REGION 1..213: note = TnsF-Tn7 System Protein
MRARPISREALVEELAELISAGPPGSWVRVAVDGAPSARPGSLADDLVAPLRLRGRPVLRVSAGDFLRPASLRLEYGRTDPDAFYDDWLDIGALRREVLEPLDPGGSGRVLPALWDSAIDRAYRVPYEELAPGGVVLVDGTLLLGRGLAFEVSVHLWLSPGALERGTPEDEKWRLPAYRRYEREVRPQETADVVVRADHPRRPAVLVGDAAGT

SEQ ID NO: 4454 - protein, 213 aa, synthetic construct; identical to SEQ ID NO: 4453
  REGION 1..213: note = TnsF-Tn7 System Protein

SEQ ID NO: 4455 - protein, 366 aa, synthetic construct
  REGION 1..366: note = TnsF-Tn7 System Protein
MRRVAVEGAAHLVLADGVVPLRPAETLFEGMLTGWERQQRARLLAASTIRTRVDLVRRFALFTGTSPWEWLPGDVEDWATELLSTPNGLARSTVRNYLNQIAMFCDYITDARYGWAEQCLEHFGAHPVQICHEENMPSHSAPYEGRPEVRALSRRELQDFFDYADEQVVRIRSAGRKGWAPAFRDATVFKVIYAWGLRRREAAQLDLADFSRNAKAPEFGRYGACYVRFGKATKGSPPRRRTVLTVWEWAAEALAEYVEEVRPHFAVGKRQLLWPTDSGGRLQGREITRRFATYRDALGLDEELHPHCLRHSYVTHLIEDGADPSFVQRQVGHAWGSTTAIYAHVGSDFMNNALREVLNAGLGEVT

SEQ ID NO: 4456 - protein, 112 aa, synthetic construct
  REGION 1..112: note = TnsF-Tn7 System Protein
MRSIRYRWHLRELMAQRGMFNTTDLAPHLAERGIEMSASQVHRLVTGTPERLNLQVFAALCDILDASPAELFEPVVVERARRKTAEESGPASAVSPGEVRRPRRAQILPDEP

SEQ ID NO: 4457 - protein, 620 aa, synthetic construct
  REGION 1..620: note = TnsF-Tn7 System Protein
MSVAAPPKHTCVRCGRLAERAARTPDGGICRRCYQNDPQRMETCASCGRNKVPSARRADGKALCGNCARPKHVCAGCGRLDHAKSRTADGPLCQRCYNAPVRPCGKCGNVRPVAVRSQRGAIDLCKRCMQSPDAQCGLCTKTRPVHTHWPLGPVCLSCYKRSTSHPGVCSSCGSTKVLIGRTSAGELACGPCVGSLTDYVCTTCGQGGPQHYEGTCLSCSIRRLTRELLTPEHGTILPGLDTLPDLLARRGRPASTLRWLIKPRTQEALRVLATAEGPLTHATVDACPPGQARHYLRALLVEANVLERRDEPIERLETWIEEFTAALAPRHAALLEPYARWGILRTARRRAVRRGFSTNAADACRERIRTALRLIEHVESSGRQISDLTQAILEDWTAGDRNRTRRIAGFVTWLNKRGVVDNVSVARGPQVPPSEISDEHDHRRRIANLLDEHCGIELSIRVAGLLVLLYGAQLTHIERLTTADVISKGPRTGLVLVQHPIDLPESVADLVDRLAQQASQNPRAQVPDSDAHYLFPGGRAHEPIHTRTLSVKLAAAGIPTRLSRNHAMVALTSDLPAAVVAAQLGLSASATTLWAKFGQRDRTEYLLARQENPSMKENLA

SEQ ID NO: 4458 - protein, 620 aa, synthetic construct; identical to SEQ ID NO: 4457
  REGION 1..620: note = TnsF-Tn7 System Protein

SEQ ID NO: 4459 - protein, 412 aa, synthetic construct
  REGION 1..412: note = TnsF-Tn7 System Protein
MLTVVAAQALGGETSTPIVDGQHRSKVWCIKDASVTTGVVTSDAEGAARRVLAPNVVQLDPQRAVLEAMLQGWEHQQRARFLKDSTIVPRLRLVRRFVEFSGLYPWQWTPSEGEAWISELRSGSSPLRLSTARNYEIDIRMFCEYLLDPRYGWIAECTQQFGEIPQQVFHEDNSIAHVGDYEGDPSRRPLTYDEVQALFDAADARVGTIRARGRKGVRTALRDAAMLKFCYAFGLRRREVVHIDLVDLRRNSKMDEFGRFGAVSVRYGKASRGGAPKRRTVLTVPEMSWIVEVLDHYLTDVRPLFPAEKRPALWLTERGSRVGVRMLNEAFSTARDEAGIDPTLDLHSLRHSFVTHLVEFDYPERFIQEQVGHSFSSTTAVYIGVSNEYRNRLLSQSMHSRYGKELGGRSSQ

SEQ ID NO: 4460 - protein, 111 aa, synthetic construct
  REGION 1..111: note = TnsF-Tn7 System Protein
MRQMDYVWHLRMKMAERGMFSTTDLQPHLADRGVSLSREQTYRLVTGQPQRLSMHTLVALCDILECTPNDLIEPQITEVATRKAAGGQASNGKVTPIKPRRTTIRRPGGAS

SEQ ID NO: 4461 - protein, 355 aa, synthetic construct
  REGION 1..355: note = TnsF-Tn7 System Protein
MTWKRSAKVMALLESVFSGQTPLTHEGLDSHQGTAGREANHLRAILMHHGLLPHRDLYLVRFELWIQNQILLLPSEVARPVEQFAKWHHLRRIRPLESPERNLQRQVHSAKQEVTETIKFLKWLWQTHERTAASCTQQDVDTWQASGPTTRKAIRTFFTFAKKTGANTQIRVGRYDTSHRPFITPQQRLNWLRELLEDNRDSLPYRIAGILLLLYAQPLTRVAALRISAVTVNDITGAVRITLGKHPLPVPQPFAELLKQHIRKRPNLGTGTGAQSPWLFPGGRAGQHLSPNTLAERLLDLGLDLRGARNTALDQHVIATPAPLIADALGYSYEVAHRHAEAAGDTWSRYIANRA

SEQ ID NO: 4462 - protein, 355 aa, synthetic construct; identical to SEQ ID NO: 4461
  REGION 1..355: note = TnsF-Tn7 System Protein

SEQ ID NO: 4463 - protein, 527 aa, synthetic construct
  REGION 1..527: note = TnsF-Tn7 System Protein
MGAVEELSREAITEPRELGFPLIPEAEQKVVIDDPGAKGSWIQRVPIVGGIVRMFSAPVIEEVRLLESGEWPPYTEQGTRLRVNERKAKSGFYAPAFQGAPTTTRQAEILNTALIAAPTGVEGVAAGRDVLSQTAISKDPFTDYNAVPRRVTSTNVLVVGDVGAGKSAYTKTVYVIRPLILRNRRAVVFDKKNEKGEGEYSPIVREFKGDHIRFRMDGTGVIFNIMDPAISGVNDDGLNNQLVYLNTIPALIREGNGPDEWERKALRLAYRTMMRNFEASRTPTTADLHDLLGVINPADATLAGMSTATLERLHEAGISMRFCFNELLETYGSIFDGETSEDVRLNKTLTSFDISQLPDTGPAIPMVMGLANLWLLGTVRRPEYRGIRTNVINEEAGHILGGPLAVQQRSNIKLSRGLGLSNIYNIHKGATDVPPGSPGMAVIEEAQTVHIFRQDKPEAAQWCVRTFGLNPDSANDIMVLRNGHHLLKSGADAPEVEIEHVRSAWEVEMTDTDSALRETDSAYADVA

SEQ ID NO: 4464 - protein, 364 aa, synthetic construct
  REGION 1..364: note = TnsF-Tn7 System Protein
MSVDGSGRVYLVGSLPLLHPEQQTFEEMLSGWRNQQLSRNLQFGTIDQRIRYVQRFMEHLNEFPWHWTPAHVEEYFGDLRSIRKLSHSTLRGHQSALRQFNSYVANPDYGWDVVCEQRFGSHPAQVFYEWNTATHAQEFEGRPSKRPFTKEELQRLFDYADDQVEAIQASGKKGWKAAYRDSVMLKIAYSYGLRFNELRHLQTVDFAINPHMRRFGKVGICKVRFGKSRKGSPPKSRSVLTVFEWTPGILEDWLANGRGTLHTLDLFPSERGGLIVESTLLRRLRRYLEELDMPSDGLDLHSLRRSYATHLAEDGWHSRFVQDQMGHEYASTTGIYQFVSDDFRVRTLQSALNRTVEEALETGR

SEQ ID NO: 4465 - protein, 112 aa, synthetic construct
  REGION 1..112: note = TnsF-Tn7 System Protein
MKRQVEYTWRLAELMAARGLHNTTDLIPLLAERGIDLSRPQVYRMVNQRPERVSLQVIAAICDIFSCGPEDLITVTAADVRARKTGAVNSPKVVDLNRTVRPRRARIINNDK

SEQ ID NO: 4466 - protein, 514 aa, synthetic construct
  REGION 1..514: note = TnsF-Tn7 System Protein
MTTNKARTRGRPRSEGDHRCDRCGRMAAKIRVTWPDGAICGICFTTALRTRGSCPGCGKERLLPGRTTDGTSICRDCAGITTNMTCEGCGTETERFRAGHCIRCVLGTDLEGLLHPHTPPDLSLKRLIGVLAAAGRPESVYTWMRGANTKELLTGLGTRTIALTHESFDALPASRSVEYLREMLIHHGMLPDRDRQLAAFEQWLAVRIHDLAETPHIQTPIERFARWHHLKRLRQMAGPGKSLNTAVRSAKQEITESGKFLAWLGADHGLAVAATRQAHVNEYLAAGPSTRYAIRTFIVWLIKNKEIGRLEMPRRYAATKPLITQQQRVALIRHCIDSTASPLGFRVAALILLLFGQPVGKIAALKCADLQALPEGLHLGLGNIPVLVPAQIAPMFWDYLHDRPNQQTGNGGSQWLFPGTLPGQHIHADAMMGQLRALGIDLGGARNTALRSLVQELPPTLVANALGYSYQVIHKHAADAGVPMAGYAGKAMHPRLKPLRIRPPNQPPEPERPE

SEQ ID NO: 4467 - protein, 309 aa, synthetic construct
  REGION 1..309: note = TnsF-Tn7 System Protein
MRATHVSARPVMDGPATERTQTLRFQTRRPRPHQMETPGSYLARLCEANLIDLDHMERLGARRRRQSGRPDEMAHVIAELGGPGPRHFYQQYVRAVGGGSPPLAKAFQRQRNRRLACLRCTAGSEITAYDHRRFMICIKHQRWIAGSTAADQRQLLDPELLAVERRFRRAMSSRLVTPQLYDDIRGVVVQNSASIFDRLWQGHRLHGRTGRDHHDIRGGLHGSLDLYPAVVRILTIAVEYLDLYWPITHGKKAVLLHPRPEQRRLYAHLRPRLEWIGSGPGSYRIIDGVVAALIAALSLRDIEFLPPRS

SEQ ID NO: 4468 - protein, 514 aa, synthetic construct; identical to SEQ ID NO: 4466
  REGION 1..514: note = TnsF-Tn7 System Protein

SEQ ID NO: 4469 - protein, 482 aa, synthetic construct
  REGION 1..482: note = TnsF-Tn7 System Protein
MLTAEEKLCIRCRKPAARLGAKWPEGRVCRLCYQRAARTHGTCPGCGTDRLLPGLDGTGSPVCVDCAGIPADFHCIQCSAEEEPYRARRCARCCLQDHLAELLDDGTGTVSEPLKPLHEGVSAQPHSRSALTWLRNPDVRDLLSSIATGARPLAHATFDDHESPRTAMHLRELFIEHGLLEPIDRNLLHFEAWLDRILAELTDPDHRHLIKQFATWHHLRRMRQLSAGGELNWGTARAAKQDISVARDFLRHLSDRGKPPSQCRQSDIDHWLATGPTTRSTARTFVRWAVRSQHLPRVEFPYRKAETRPVLDQNERLRLLRKTLENQDIALHHRAAAVMLLLYAQPLTRIAGMRSEQISRTDDGETVVVFENQPVPVPHPFDEILQQHLADRPNMNTAANRASAWLFPGYRPGQHLHPGHLMKKLRESGIHLLGARNATLRALVLTMPPPVAAQALGYSTQITEQHAKQADNTWATYASYRR

SEQ ID NO: 4470 - protein, 258 aa, synthetic construct
  REGION 1..258: note = TnsF-Tn7 System Protein
MLLTRSENGLDAIQWRGPDKRIFTAPATRGLLTQPVIEALPIRVGGQWQNRPNRHGLYFWERTGRHLWYESALELACLLGLDFEGSVQGIASQPFRMLFRAGAKSVRHDPDFFAVHRNGDQVVYDVKPRARMSSRVSDQFEESSRVCTLVGWRHAVLHEPDPVLAANLDFLRGARHTRNHPGEAVFGQILNVFEGGRAIGEGREMVNRRFPALAMPSIKHLIWHRFLEVDLTRRLDFDSIAATEIDAIRSPEEASCCV

SEQ ID NO: 4471 - protein, 318 aa, synthetic construct
  REGION 1..318: note = TnsF-Tn7 System Protein
MTRQPGPAGTAGQQIARDVALFNPAEQVFQAMLDGWRNQQLSRNLAFTTIARREQVIQRFRSFTGEDPWSWTVGDVDEFFMELRAVRSASHSTLLAYQNALRLFLGYLTDPAYGWEQECMERFGTHPVQVCHEWNTAAHVQEASARPRKRPLTRDELQDLFDYADDRVDHARKQGRKGWISAFRIATAIKVAYAWGLRRNEVRMLELTDFGTNPHAAEFGRYGVLYVRHGKAMRGSPPKRRSVLTVPHTGWAVDCLKQWIEEVRPTGTGEEHASLWPTERSGRVSADSLTREFTLLRTGLGLADGIDSIPCAAPTSPT

SEQ ID NO: 4472 - protein, 368 aa, synthetic construct
  REGION 1..368: note = TnsF-Tn7 System Protein
MDPVEGQLIRLPLRQGALSADAVFEDMLTGWKQQQLARNFTAGTIRGRESLVRRFVDHTGHFPWDWTVGDADEFFAHERSILNLAFATIRAYQTHLKVFCDFLTDPVYEWDRVCLQGFGRSPAQIITEFNRARHAQNNEQAPTKRPFTRAELQGFFDLADLEVERVLASGRKGAVAAYRDATVFKTAYAWGLRANEVTHLQTVDFSRNRRAPQFGEFGVLQVRYGKAQRGSPPKRRSVLTVFDWSPAVLDTWIRNGLPWLAPAVSEIFPTANGLPVPKSNLHRRFRDYIDELGYPPGLDIHSLRRSYVTHLFEHFGFDHTFVQRQVGHEHASTTSLYTSVSSDYQTSELNRVLEDMIEKAVRPKEERE

SEQ ID NO: 4473 - protein, 695 aa, synthetic construct
  REGION 1..695: note = TnsF-Tn7 System Protein
MLRLNLGDLLTWRGEEYVVAAARPHTAMLRRIAGNDTVWIDIVALADELIVTDPVAPPVTDPHGTGQPANEDGDCLAVLGTLTGEELAAARWWVSHLNEVISGVPDPDDASLLPRSGYETGRKTDRRALKVLELNAAGHKVSARSLRRKERQYLLHGVHGLVDRRALVAPQAIPSVDDRIREAVLAVLAATNGTSTVSVTTLIDKARAYVAQRYRGQEVEFPSARTMRRVFAAYDHRGLATGKATSRRSEANRHDRGPRPVAAVTPGQVVEIDSTPVNVWALMSDGKPGRVHLTVAVDVATRSILAFDIIPVSTSGVEHADLLARILRPRQCRPGAPDYLRLDKSQTLPSAAMIAADERQRGALALPYIVPETITTDRGKDYLSETFVSACRHFGISVVQAPPHSPTFKGHVERVLGTIDTMWMQKQPGYVGNSVANRGEIDLGELRTVRELQESFEEWWVRVYQNRPHGELRDRDVPSRMFTPNQMYAALFDAGAGIPVPLGQATYIALMPVERRTIQNDGIHVDNLTYWHDDLPRLRKLTPPTRDGKWEVRKDPYDSDRVWVQDPKTNQWLECISESYRLASYPFASALRLLRSTPPVDDAAGEAWAVGELGRQTALKDRTKGRKDEKRRAVLARQRRDDDPRPGPVPAPDPAPADPTTITVRTLGHAATEDQGNGSLDDFALVRTGDRLWND

SEQ ID NO: 4474 - protein, 350 aa, synthetic construct
  REGION 1..350: note = TnsF-Tn7 System Protein
MTNQAAAPASKNTLTGMRRLIDFDLDEPPTLSRATYEALSPADRAAHDEARLRWFGSGFLFGTKATNHLLRSVRGYLLMRDPDVVGSQRITVLTGPANVGKSTTLLQLAKEVESHAGRRYPSFRADGRAPVVLIEMSPGATPKGVAASILDFFAVPYRTHDTHQKMIRHAAELMIHHQSSLLVVDEFQMVQLEGRRGDDAINTIKSIINATGVVTVLAGIDLDQRLGSRAAEQLMARGETQRHSPFDYATDGDRQHWANLVAAFGVQMRLIDGPPDLAPYADALHAITAGRIGALRRILGTALMIMLEEKRTPSTPEVLTLEHLQAGAGPLLTAPATPKRRAAAKESNAA

SEQ ID NO: 4475 - protein, 350 aa, synthetic construct; identical to SEQ ID NO: 4474
  REGION 1..350: note = TnsF-Tn7 System Protein

SEQ ID NO: 4476 - protein, 113 aa, synthetic construct
  REGION 1..113: note = TnsF-Tn7 System Protein
MKRDIEYRWRARELMARNGMRNTRELVEPLRERGITLSESQIYRMVSQNPERISFQLLAALCDIFGVEANELFTFTAADARSKRQKQAAASGENVVRFADAYKPVRARILDDE

SEQ ID NO: 4477 - protein, 374 aa, synthetic construct
  REGION 1..374: note = TnsF-Tn7 System Protein
MQPLAQAIVGMPRPNTGCTWISQNPRVRELLRGLADGSIALSHEALDGLPPTRTVEYLRGLLVTHGCLPQRDEHLAAFDRWLTPKLDAISDPEQRRLIERYSRWHLKRRLRDQARTAPVTAGAFLRAKQHITVATQFLNWLGIRGRRLGECTQYDIDAWFGNGTTTRQYANLLYWAIRQRLVRNITLPLPTSRSSPLASEEEHLNALRTLLLHDTLPAAHRAIGLILILFGQPLSRIVKLRTDQVRDTPDGLQVAFGSDWLSVPEPAAVVIRVHLTARPGLNTAANPTSELLFPGFMPGRPMHVYAAASILRAIGIRPLAARSRTWLQMVREAPPSVLADTLGISAATAMRYAERAGTDFLAYAPLPSKEQRTI

SEQ ID NO: 4478 - protein, 374 aa, synthetic construct; identical to SEQ ID NO: 4477
  REGION 1..374: note = TnsF-Tn7 System Protein

SEQ ID NO: 4479 - protein, 108 aa, synthetic construct
  REGION 1..108: note = TnsF-Tn7 System Protein
MVRRLSYHWHLRRIMAAHNIWKTTELIPLLRDRGINLSTAQVYRLVTDRPERLSLPVLAALCDILNCSPADLIEPYVEADRRKRTADEATVIDLKPDFRPERARILED

SEQ ID NO: 4480 - protein, 361 aa, synthetic construct
  REGION 1..361: note = TnsF-Tn7 System Protein
MAIMRELATRQRALTHAGLDELPDSKPLRHLRSVLVATGALPARDEQLIRLERWITVTLADLTDPEQRALLHRYARWHALHRPRRRNNGRHATDGQRMAIQHNISAAITLLDWLSARGLDLASAGQGDLEQWLTCAPATARVGAGNFVRWARRNKITTLAFAATKWDGPRRIIDSEARWTHARRLLHDDNIRAEDRVAGLLVLLYAQSTTTISRLTLEHVHADAHEVRLRLGREHIVLPEPLDALVRELVASRHGHATVGDQGMSPWLFPGGRPARPISASRLGERLQQLGLQPGQARSTALFGLAEELPAALLARLLGINISVAVAWQRASAGDWTGYAADYSRRARSSSIAGPTHDEHS

SEQ ID NO: 4481 - protein, 361 aa, synthetic construct; identical to SEQ ID NO: 4480
  REGION 1..361: note = TnsF-Tn7 System Protein

SEQ ID NO: 4482 - protein, 394 aa, synthetic construct
  REGION 1..394: note = TnsF-Tn7 System Protein
MTTARRKFTQEFRDELCREVISTSKPIRDVAESYGVGHETLRNWLIKYREANGGTETELTVPERARLKVLERENQELKAETQFLKKGGRLLRAGAAVVSKYEFIDSQKAEPNNRNPVVNMCRWLEVSTSGFYHWLTRPQSATSARRETLLARIRHYFEESDGTYGYRRIHADLTAEQTQCSPELVRQLMRQEGLVACQPRPFRVTTEADALAAANVPDLVKRDFTADRPGMKFIGDITYIHTWQGFVYLATVIDCYSKKVVGWSIADHMRTELVEDALKNAAATTLIAPDAIWHSDRGSVYTSAVYRALVTSLGMRSSMGRTGVCWDNSMAESFFSMLKNERVYRTVYATKTQARSDIIRYIEGFYNSRRRHSALDYRRPNEVHYGYQQPALAA

SEQ ID NO: 4483 - protein, 394 aa, synthetic construct; identical to SEQ ID NO: 4482
  REGION 1..394: note = TnsF-Tn7 System Protein

SEQ ID NO: 4484 - protein, 308 aa, synthetic construct
  REGION 1..308: note = TnsF-Tn7 System Protein
MIAFIDAMRDRFGVELVCRTMRAAEVGFVTARGYRAAKSRPASARTLSDQVVGGEIVRLHAENYGVYGVRKMHRLLKRQGWEIGRDQTGRLMRAQGLRGVKRSKRVFTTKSDPAGRRPTDLVQRRFRADAPRKLWVVDVTYVRTWQGFAYVAFVTDVFSRRIVGWNVAATLKADILPLQALNMAAFDAGGDLTGLTHHSDHGSNYMALVYTDRIAELGAVPSTGTIGDSYDNAMAEAINALYKTELIRARGPWRTVEQVELATLEWVWWWNNQRLHSELEYRTPTEAENEYYADAESLLKATASQEKT

SEQ ID NO: 4485 - protein, 370 aa, synthetic construct
  REGION 1..370: note = TnsF-Tn7 System Protein
MLRQAGLAGAASSELADGVVQLRPEDAMVEAMLHGWRAQQSARGLNVDTIDYRERLVRRFESFTNEFPWQWGPGQVDEWTLTLTAENHLASATIRGYQTDLRLFSEYLTDTRYGWTTACEEAFGEFPVPICHEWNTIAHLNDYEGSPEARPLSREELQLFLDYADEQVERAARSHRKGALAAYRDATMFKVIYGWGLRRTETAKLDLSDWGRNPAAVEFGRFGMLHVRYGKAVRGQPPRRRNVASVMGWAVEAVADYVENIRPRFGAVDHPALWVTERGGRIKPAEINARFVAYRDAIGLPRVLTPHSLRHSYVTHLTEDGADRRFIQEQVGHRCDTSTAIYTHVSSDFMNTSLRKAIGPALDEAPGQQR

SEQ ID NO: 4486 - protein, 264 aa, synthetic construct
  REGION 1..264: note = TnsF-Tn7 System Protein
MSATGTRPTLAGISEPAAAAAISAACKTLYLTGTAKIAASMAEEAARARLSHQGYLAEVLTFECDQREDRRRDRRVKEAKFPRPKRLEDLDLAHIPDLPPATMTQLAGGSWIDAGEPLVLLGDSGTGKTHLLIGLGTAAAEQGRRVRYITTAALVNELVEAADNKELSRLVGKYARLDLLCLDEVGYVKLDTHGAELLFQIITAREERASIACASNANFSEWGQTFTDPRLAAAIVDRLTFRGHIINTGTDSYRLKTTRQAQKG

SEQ ID NO: 4487 - protein, 264 aa, synthetic construct; identical to SEQ ID NO: 4486
  REGION 1..264: note = TnsF-Tn7 System Protein

SEQ ID NO: 4488 - protein, 209 aa, synthetic construct
  REGION 1..209: note = TnsF-Tn7 System Protein
MLADPLSVVIDLVAGLEPDLDRACITEVVTGVGGGRAKRRRVAQALLDRPGILTDGRSPAPEAIGKLLTALRDAGAVNVQAPVCAECGKAMRAFQRRGQDWYCGVHGPQAAACVVCGNVRPIAQRDRQHQLHCWQHPLSDDRDPTQVLIDLVADIDPALDTPIVTAAIRTAAPRAGQRRRLAWALQDHPELLAGAGAQASVPTVLRSYD

SEQ ID NO: 4489 - protein, 110 aa, synthetic construct
  REGION 1..110: note = TnsF-Tn7 System Protein
MARKLDYRWHLRRVMAERGMFATTDLIDPLAARGIRLSSSQVYRLVVERPERLSLKILMALLDVLGCSMGELIEPVAAGGQARTRAVVGGTDAGVGELRPRRARITDAGK

SEQ ID NO: 4490 - protein, 290 aa, synthetic construct
  REGION 1..290: note = TnsF-Tn7 System Protein
MRGFIDWHLMRRLRGRLKDKPASVQQIQNVRVHLVAADAFLHWLADQGTPLSGCTQGDVERYLNSKPPYPVRCTAFIRWAVRQRYAPAGIKAPAIRWTGPAGPHDQDARWAVARRLLHDDSLPTADRVAGLLVLLYAQHVSSIHRLTTDRVTKDGDRVLLRLGDRPIRLPAPLDSLMSDLVAARAPHAVLRHESEWLFPGRKAGHPIHQSQMLRRLHAIGIKTRQGRNTALFALAQQLPAGQLAKMLGVYISVAVAWQRASGGDWMAYAAAVAARSATRTRPLTGSTPGT

SEQ ID NO: 4491 - protein, 375 aa, synthetic construct
  REGION 1..375: note = TnsF-Tn7 System Protein
MNTTFTPLYNLLISSGRAPTLVNWIHRSSSAALVRRYVNDELPLTHDSLDEWPSERTATHVRQLFLAAGLLEQRDEILHGFEAWTRTYLATHPGPHHNALQKYARWQISQPLHARARKGTLTLDASSQARQKIKVAAQFLQTLPADTTSRERIQPVLEDHILAYPQHRNRLAPFISWAQTQKLFPLAALKITAAPYPSVALSETDYWATIHRLQIDEDLPLRARVAGLLVGLFAQQLTTLIWLTADDLTEQGGKVQLRLGHDPLTLPNHVAELLIDLRDSVPPWTTEDHVRWLFPSRQRAGQHIHKRTLGDGLLRYGIRTTPLRGAALINLASKIPVGPLSDLTGISNQAAARWAEVAGRSWNAYPQLRTSVLIE

SEQ ID NO: 4492 - protein, 396 aa, synthetic construct
  REGION 1..396: note = TnsF-Tn7 System Protein
MDRARNPYTPNAGAPPRFLAGRAQETEDFRVLLQRLANGYTEQSVIITGLRGVGKTVLLGQYERIAEDENWVPVVAEVSKNTPFGPQIANLSRRALFQVSPKARWGERAAQAAAVIKSFSLSVQADGAMTAGLDVEPAWGTADTGSLNDDLADVFQAIGEAAAEKKRGVVFLFDEIQFLAKTELEALIGAVHRTVQRQLPVTFAGAGLPGLPGLAGNAKSYAERLFKFSSIGQLPRAAAVQAIVEPAKVEGVTFSPEAIEFILAYTEGYPYFIQEFGRAAWNTADGPVITLVDAEDALSQVESELDGSFFQARVQRTTPDELTYMRAMAELGSAEQKAADVAAVLHKSSEQLGPIRSRLIAKGLLYTPRFGYAKFTVPQFDRFMRRHMTLDIESTG

SEQ ID NO: 4493 - protein, 396 aa, synthetic construct; identical to SEQ ID NO: 4492
  REGION 1..396: note = TnsF-Tn7 System Protein

SEQ ID NO: 4494 - protein, 375 aa, synthetic construct; identical to SEQ ID NO: 4491
  REGION 1..375: note = TnsF-Tn7 System Protein

SEQ ID NO: 4495 - protein, 381 aa, synthetic construct
  REGION 1..381: note = TnsF-Tn7 System Protein
MSNNDAFIATTERVMIDLPDARFALVTAIDPERSMFDAMLDGWERQQFSRGLSAGTVEHNTGFIRRFELALGEYPWHWTATDVEDFTSSLLSMSPPRAHSTLRGYHQTITTFCDFLTDPRYDWAERCTEAFGTHPVQICHEWNTRAHLSEFEAKPAKRPFSYDELEAFFARADLIVEEIIQKGKKGALSALRDAQLFKTVYAFGLRRTEAAMLDLADLRSNPNSPQWAGYGVVHVRFGKAINGGPPRRRSVLAVPEFDWAIEGLKHWVEQARPKFLAHKTNALWISERKTRLSIRHLDYRFAAIRDQAGLDENLTLHSLRHSYVTHLIEFGYPERFVQEQVGHSYASTTAIYTSVSNDYKNRILASALGRVYSPTPEGLNQ

SEQ ID NO: 4496 - protein, 108 aa, synthetic construct
  REGION 1..108: note = TnsF-Tn7 System Protein
MTSPYTVTWNLRQLMATQNLFKTTDLVPLLAEKGVALSREQVFRLVTQTPIRLNLDVLGALCEILACTPNDLIHVDRVTLSGDVAVNDNGPLHPIGDLRPVPATIRRP

SEQ ID NO: 4497 - protein, 418 aa, synthetic construct
  REGION 1..418: note = TnsF-Tn7 System Protein
MHPCTHDAAASRSELAPLADALLSMDNPISGLTRLNTRREHPDSPENLLRRLGRGEIGLPHDAFHTLQPWRAAAHLRELLMDCGVLPAIDKRVCLFERWLVDHLAGITNPRQAQLVRRFATWEVLPRLRTSADRRALTPSSTRYAADRVKHATVFLRRLDDHGRDLATCGQADIDLWHAEHNEHDRKSVRAFLLRCQNTKLSRRFRLPAAQIQRAAPLAQRERLDMLGRVLTDETPPLRSRVAALIVLLHAQPLSRIVHLTVDDVIHDDRHVLLRLGDPPTPVPTAVAELLLYWIANRDNMNTATNRDSRRLFPGRRAGQPMHPDALSAQVNELGVPAVASRVAAIRQHVRELPAPVVADALGYHHKTTTRLQTDTGTPWSRYAPGDHSGRTAEAVRSSPGPAADIRSRRCPRPDPPM

SEQ ID NO: 4498 - protein, 418 aa, synthetic construct; identical to SEQ ID NO: 4497
  REGION 1..418: note = TnsF-Tn7 System Protein

SEQ ID NO: 4499 - protein, 370 aa, synthetic construct
  REGION 1..370: note = TnsF-Tn7 System Protein
MHERLQPLSDYLLAVKDPRTAVRWLKRESVADTLRGMAKGQLPVAHTTLDELPLSMKTRYFRRLLISANVLPEIDVFLNELELALARFLTTIPEEHARLIRRYHQWRTLPRLRQRAEPTSTGVFANHMRNVRLIAAFLAWLQEQHLHLSTMDQAVVDRYFAAASSRDVLGQFLTWAAGSGLCTRVEVPRVRGGPPQAAMSDEALAELAERVLADVALSPVGRLLALFAIVYAQPIRSSVELRLEAVEQDEGRVSIRFAATRVHLPATIAKLLQEHLEQLETRGSYHPIVNEWLFPGIVPGQHLAAGTGIGLLTRAGLSVRALRTSRLVLLSQTVPARVLADVIGISTQTAHARSIASGGTWQSYPELRRG

SEQ ID NO: 4500 - protein, 370 aa, synthetic construct; identical to SEQ ID NO: 4499
  REGION 1..370: note = TnsF-Tn7 System Protein

SEQ ID NO: 4501 - protein, 338 aa, synthetic construct
  REGION 1..338: note = TnsF-Tn7 System Protein
MLAGWVDQQVSRGLAPSTITARVAMIRRLREFADAYPWAWTPEDLEAFSVELASGARPVTKSTLRGYQVVVRAFCDFITDARYPWAAECVERFGEPPVQICHEWNTLAHIVEYEGRPQRRALTYDELELFFTATDERVAAIQRAGRKGALSALRDAVLFKTVYAFGLRRSEAAGLDLADVRSSPGVSRFGECGAVYVRWGKASRGSGPKRRTVLAVPEFDWAVEGLRQWIEEDRALYGASRSDALWLTERGTRVSLRYLDFRFAELRDHLGLPPELTVHALRHSYVTNLIEWGYAERFVQDQVGHAYASTTAIYTSVGDDFKNRVLANALRRIYGDDS

SEQ ID NO: 4502 - protein, 112 aa, synthetic construct
  REGION 1..112: note = TnsF-Tn7 System Protein
MTSPTIQWNLRTLMAANSMFQTTDLIEPLREHGVNLSREQVYRLVTKVPERLNTTVLVALCHIFGCAPNDLIEIPDAAAARERSAVNEPATSPVVQRELKPVPARIQRPTKA

SEQ ID NO: 4503 - protein, 469 aa, synthetic construct
  REGION 1..469: note = TnsF-Tn7 System Protein
MTVGACDECEGDKQHISRRYFGKRFCQSCYSRLFIKKPCATCNEVAKLPVFEVEPICQSCVRKEPCVRCQRQGLSVGKLTKKGPVCKACHPYFKPEKTCQQCGKISRFAWNVDVEDKSLTLCMPCANQDHKTCYKCRRYRPVYTIEKDKPICKKCKLEGDVGCRQCGALHPAGYGKICYSCYAMNTFRKRQSIGAQAYENKAVTIKWHQFCDWLLDEVGADRARLKINKFVNLFQSLDTEYGDIPQHEKLLNALGVKALRKYALFKRWAISAGFYSVDEQTEQAFSAQQLINDYLTSFSDDNEATTLLRAYHKKLVSKGSETRSVRLAMTPAKRLLDISKGDVPEQKHIDLLMMTSPGQKASVTGFINFINQQLSLDLVIRDKHVFAKLIENKLAQKMLMLMQEDKPDIEEWLLTGMAYFHGKVMNKKAFSSVKLTLHSVNEAHLYTDNKQYLLPLHDSMHDGIKNFID

SEQ ID NO: 4504 - protein, 469 aa, synthetic construct; identical to SEQ ID NO: 4503
  REGION 1..469: note = TnsF-Tn7 System Protein

SEQ ID NO: 4505 - protein, 225 aa, synthetic construct
  REGION 1..225: note = TnsF-Tn7 System Protein
MLDMTPVRKIKNTRRSISGFYMFQGVEQTQFESTLERDFLIRHEYQGDIVGIVSQPCTIKYVHPNGRTYNYTPDYLVMHKVGNKRFSEYQKPLLVEVKPTKELREHLTEWRPKFKAAMRYAKSHGYVFKIYDESRIRDVTYRNIRFLARYKGREYDSGDVDMVMETVNNMGSATVDYLLAKCFNGMYRAEGIGVIWSLVAEKKLLCDFHEPLSNTTLLWEKHSND

SEQ ID NO: 4506 - protein, 657 aa, synthetic construct
  REGION 1..657: note = TnsF-Tn7 System Protein
MSRYRIQRYCGRNTAMTDDGFTIDRAPINLSVGSYVLYLNEEYKIKEVIDFYTVIGQSLTTGRLVSLMVKELRSVSADDSSRVNIDLTEVGDDDWKTAQHRYSVIQPLLKLPIYGRKDVEARADEVNVNTATIYRWLKMYIPYGHIMALVPRKRGRNKGSWQIEFAREKLLTTVIDDYYLTKQRPSIQATVVEVERTAKLSGITPPSASTVRKRIMALPEKDTLWKRGQKEKAKNKFTPAAGKFPNADYPLAVIQIDHTPLDIILVDDEYRLPIGRPWLTLAMDIHTRMIVGYYIAFDEPSETSVGMCMAHSMLPKEEWLATYDVHASWPVWGKPVTVHVDNGADFRSDNFKRSCGAYGINLEFRPVRAPRYGGHIERVLGTFVREIHRLPGTTFSSIKERDNYDSEKHATLTKSEFETWFVNLVCRVYHNRKHDSLGMSPLQMWERSVFGDASCPGIGMPPRFSDSQKLILDFMPTVYRTVQTFGVKFEGLLYYAESLRHKINAIDSQTNKKQKFIFRYDPRDISKLWFYDPELKQYFPVPYADQSLPKMSLWELKLVKTKLRDKGSESINKHQVLDALTDMRNVVDNAAKSTKRARKQLQKRKEHEKKSTPMMTVDNPVTENESSTLYDTSNTDSANIENPLGLLYDVDEYGDIC

SEQ ID NO: 4507 - protein, 366 aa, synthetic construct
  REGION 1..366: note = TnsF-Tn7 System Protein
MFLREKHKMPLRIRSGEVFSSWLIRLAMHYGVTTLTLGAYFWPKRRIWTMDVDSMGITLDLAKISDMTGNSEASICRSFPAHCYDGVGTLDDVKQHLTHWFLRLGTRNVKRHSGIPYCPRCFCSHEYIYIKQLWRMAWHTHCEDHYCLLRQGCPKCGALYAPHRLPLGTLNIGYCHQCASPLGESTYDEKNESAYTLQALCISTIASNEGPFNLLTVTAHAWLEQLYFITNLTKYAISRDNGFFKLMLPFMNYTDVTKALDDGLPFTQSNNSYRAHIMQHVYDVWQTHGPEMVTACIDNGVSMNTINPDNVVLPEAISTAFKDLQMKEYALPWNAKKLNGVVERPSTDASVRKKWRRLQRKYLGRQ

SEQ ID NO: 4508 - protein, 228 aa, synthetic construct
  REGION 1..228: note = TnsF-Tn7 System Protein
MSINDRGSIPRPGEISLAHNGVLFLDELPEFDRKVLEVLREPLESGSVSISRAARQAQFPARFQLVAAMNPSPTGSLNDGRSSCEQILRYLNRISGPFLDRIDLQVDVPKLPSSDFSEQVKSRGESSQVVRTRVVQSHQLQLSRCGKTNAQLSSKEVEKYCKLEKPEQLFLQQAVEKLGLSLRTYHRVLKVARTIADLAHCPDINRQHLAEALNYRAFDRMLAQLTNH

SEQ ID NO: 4509 - protein, 295 aa, synthetic construct
  REGION 1..295: note = TnsF-Tn7 System Protein
MNDTHIHPDFQHILALSDEERLAFLDMPRWIGYARAKKILDTLHGLMQKPLKPRMRNLLLVGESNNGKTTLIERFFELQGKGYVNEKTEAVKPVIIAQSPPSADEKALYIALLEEFFVPYSMNDNKAKLRYQVIRTFRQCNVRLLIIDEMHSLLTGSAIKQREVMNAIKLLCNELAIPVVGVGTRDAVNVLHTDPQHASRFDVISLPSWELNSEFQRLLASFAKVLPLKKPSLLHQPDIATQLHVISRGNIGDLHRLLIECATHAIKSGKETIDMDVIKQFSWVKPTQGIREICF

SEQ ID NO: 4510 - protein, 295 aa, synthetic construct; identical to SEQ ID NO: 4509
  REGION 1..295: note = TnsF-Tn7 System Protein

SEQ ID NO: 4511 - protein, 390 aa, synthetic construct
  REGION 1..390: note = TnsF-Tn7 System Protein
MLRQLISRPDGTPHPDLLPLEKYMLADARRAEAVVGWIRKSPMADVVRQMAQGVITISLHTVAAVPATGASGYFAALLIESGTVPPDNFDRLRLEHWEREEFAKLRNPHDRQILHRFASWTINRQFDEPVRVSGDESLRLTRARQQLTLIIDMLTWIDELGYDLSTVPQRAFDGWLALNGRRGYGATRFVRWARAQGLTRLRSTYGPRGVPTVEISDDVRWTWVRRLMFDETLRLSWRVGGLLALVYGMIGTRIVMIPLSAVDATDANVRLTVGREALVLPDNLGDLVRRQIAAERHRDPAARWLFPGRRPGRHLSARALKTPLEKIGIHIGPGRAIALMTLARDIAPSVLSDLVGVSIEAATRWSNLSSHDWSDYPRLRLSEDASDAGR

SEQ ID NO: 4512 - protein, 247 aa, synthetic construct
  REGION 1..247: note = TnsF-Tn7 System Protein
MVRGSWAVNIRKFLPKYRSLDALAAQGMMPTDVAELLTTAMNDGRSVIVSGATHAGKTTMLGALLASCAGTQRIVTVEETFELAVEGPDLVSLQGRQASLEGTGEITLRRLVKEALRMRPDRLVVGEVRDAEALDLVLALNTGVPGACTVHANSATEAIEKLTILPLLAGRNIDRAFIAPALAASIDLVVHCVRDQAGRRHVQEIIAPTGDIDEGKVRTRSVYRARTRQSDDFGRERGDLRPIEAAS

SEQ ID NO: 4513 - protein, 247 aa, synthetic construct; identical to SEQ ID NO: 4512
  REGION 1..247: note = TnsF-Tn7 System Protein

SEQ ID NO: 4514 - protein, 395 aa, synthetic construct
  REGION 1..395: note = TnsF-Tn7 System Protein
MPKPYPTEFRDDVVRVARNREPGVTIEQIAKDFGVHPMTLQKWLRRADVDEGAKPGQSRVEGAELREARKRIRLLEQENEVLRRAAAYLSQANLPKRFYPLVTELAAAGIPVTVTCRVLKLSRQPYYRWLADPITSSEVVEAYRANALFDAHRDDPEFGHRLLADEARDAGESMSDRTAWRIASTNGWWSAFGKKRGKGRRPGPPVHDDLCAVIDEDGRTRHVFAADAPNELWLVDITEHKTSEGKLYLCAIKDVYSGRIVGYSIDSRMKSRLAVQALENAAQMRGDVAGCIVHSDRGSQFRSRKFLRALACHRMVGSMGRVGSSGDNAAMESFFALLQKNVLDRRSWTTREQLRIAIVTWIERTYHRRRRQLRLGRLTPIEFETIMNTTAALAA

SEQ ID NO: 4515 - protein, 348 aa, synthetic construct
  REGION 1..348: note = TnsF-Tn7 System Protein
MFRREEAVFRSMLGSWSQQQLARGLSPETTRGRDGIVRRFCDFTGRYPWSWQASDLDAFSSHLRSAGRGRSTLRQYHNSIRVFCDYLISNDYDWVELCEAEFGDVPSQICLPWNTTKHVAEYEGRPSNRAMTYDEMETFFACADARVDELARARKKGALAALRDAQMFKTAYAFGLRRAELRGLDEQDLHFNTRAPQWGRYAALFVRHAKAVRGGNPRRRTVLLVPQMKWWVECMEQWMEEGRPLFGQPDLAALWPTERGTRVSLPYMDRRFAALRSEAGLDPSLKLHCLRHSYVTHLIEHGYQDRFVQEQVGHLVASSTALYTSVSGDFKNGILAERIRLDELEALP

SEQ ID NO: 4516 - protein, 250 aa, synthetic construct
  REGION 1..250: note = TnsF-Tn7 System Protein
MVQAREVRKSFGGNEVLKGITLDVKAGEVMTLLGPSGSGKSTFLRLINHLETLTAGTLAVDGDLVGYRRAHGKLYELREHEIASKRSEIGMVFQSFNLFPHLTVLQNIIEAPIGVLRQPRAKAKARAEALLERVGLADKRNAYPATLSGGQQQRVAIARALAMEPKLMLFDEPTSALDPELVGEVLGVMKDLAQSGMTMVVVTHEIGFAREVADSVVFMDGGVVVESGAPEQCLLNPQHPRTKAFLSKVL

SEQ ID NO: 4517 - protein, 250 aa, synthetic construct; identical to SEQ ID NO: 4516
  REGION 1..250: note = TnsF-Tn7 System Protein

SEQ ID NO: 4518 - protein, 109 aa, synthetic construct
  REGION 1..109: note = TnsF-Tn7 System Protein
MTRVETVWNLRKVMFEHQLFKTTDLIPLLAQYGVHLSREQVFRLVTHTPERANMQVIGAVCAALGCTPSDLIEVRVIEERRVAVEQTRQPIGDIRPRPASIRRPPSPPA

SEQ ID NO: 4519 - protein, 222 aa, synthetic construct
  REGION 1..222: note = TnsF-Tn7 System Protein
MRYCLTQTVHFLQRLRHADTSLTACTQEDIDAYLCDGTVMRYKARGFVLWAARRSHIRHPVDFPPMPSDKPRRSLVDDERWRLAHRFLHDDTIDTVDRVVGLLVLLYGQPLTKMSRLTTSHVIQAGQRVQLALGTHPVDVPPPLDRLLLALAEDREGPPGLGRADQPWLLPGFLPGRPRGTAHLRSRLTAYGLPSRRGRNSALMDLAAQMPPPSSAKSSASV

SEQ ID NO: 4520 - protein, 303 aa, synthetic construct
  REGION 1..303: note = TnsF-Tn7 System Protein
MSTVNPAASRHRVPAQPAATEPPSPVVSLRGAGVRVGGRTLWSGVELDVGAGEFVAVLGPNGVGKSTLVKVLLGILPPAAGEVSVLGEAPGRAGHRVGYLPQRRSFDASLRIRGTDIVRLGLDGDRWGVPLPLPGRFGARRRAARDRVAEVVELVGASAYAHRPIGECSGGEQQRLLIAQALVRDPELLLLDEPLDSLDLSHQGAVAALIGRICREAGVGVVMVAHDVNPILPWLDRVVYIAEGGAVAGRPEEVITTETLSRLYGVPVEVLRTSDGRLVVVGQPEAPARHSDRHLEGGRRELG

SEQ ID NO: 4521 - protein, 303 aa, synthetic construct; identical to SEQ ID NO: 4520
  REGION 1..303: note = TnsF-Tn7 System Protein

SEQ ID NO: 4522 - protein, 337 aa, synthetic construct
  REGION 1..337: note = TnsF-Tn7 System Protein
MLEGWARQQRGGRRLATETILGRQRIVRRFMEGINEYPWTWTAGHVDEWMTCLVAEEKRARSTVRSYQDALKLFCDYITSPYYQWPEVCEARFGTHPVQVCHEWNTVAHLTDYEGRPGRRPMTREEVQLLLDHADDQVDRAIRLGRKGALAAYRDATVFKVIYGWGLRCNETSRLDTTDFYRNPKAPELGRFGSLQVRYGKASRGSGPRRRMVLSVMPWAVEAVQDYLVNIRPHRCSGGSAVWLTERGGRLKPREMEERFAEYRDELGLDTDLTPHCLRHSYVTHLIEDGADPAFVQEQVGHRFASTTAIYTGVSGDFMNTMMRKALDRAYAADQET

SEQ ID NO: 4523 - protein, 112 aa, synthetic construct
  REGION 1..112: note = TnsF-Tn7 System Protein
MADKLDYQWHLRTVMASRGLFSTTDLRPLLAERGIDLSPSQVYRLVVDKPERLSLRTLMALMDILGCRMEELIEPVAASSAGRRRAVGGGAGEGGVGAFRPKRARITGDSDG

SEQ ID NO: 4524 - protein, 423 aa, synthetic construct
  REGION 1..423: note = TnsF-Tn7 System Protein
MCSGATNAYLCSTCGSGRETERGTRCARCVLRDRLATEFLSSRGEVPAEVRPLLGALVRVPRARSILVWLDKPRGGAACLRRLVADDLPLTHKTLDSADPGQGAASLRATLVHLGVLPPRNESLAGLQPWLERTLTPLPAQHRRTLHIYAEWALLRRARRRAARGRFTPASAAAVRSAIRCTAAFLTWLDTHDIPLADLTQGDIDTWLSEHRDRRHVRLFLRWAHERRLTGNLEISDRPRDEPHCWWSESEHWTHLRRCLHDEALPLDVRVTGALMLLYGMPITRIVALTRSDLTGGSPPHLRIGEHPVALPPAVHQLLQRQADHTEPISAVGRITPRPSWLIPGYAAGTHHSAPALARKMRLHGLPARPSRNTALLALAADLPASVLSDTLGISISAALQWTRRAARDWNSYLAARSTEDRD

SEQ ID NO: 4525 - protein, 423 aa, synthetic construct; identical to SEQ ID NO: 4524
  REGION 1..423: note = TnsF-Tn7 System Protein

SEQ ID NO: 4526 - protein, 361 aa, synthetic construct
  REGION 1..361: note = TnsF-Tn7 System Protein
MVLVDNVVPFDPEPQIFEAMLEGWARQQRVRFLKKETIDRRLALVRRASRFSGQYPWQWSAAEIEAFIDGLRSGSRPIKVSTARGHLTNLQLFLGFATDPRYGWAAVCTERFGQAPQQVLGEWNTITHANEYEGSPERRPFTYDEVQALFDAADGLVESVRARRRKGALAAQRDAALLKMFYAFGLRRREAWGLDLADLRRNPKMPALGQVGVVQVRWGKSSRGGPPKRRTVLLVPEMDWVVPVLQQWVDEVRPLFSPGAHPAWWVTERRGRMSCRRMDDVFASVREAAGLDEALDLHCLRHSYITHLIEFGYPERFVQDQVGHRYASTTAIYTGVSLEFRNRLLTQSLRDRHPELWEPAL

SEQ ID NO: 4527 - protein, 103 aa, synthetic construct
  REGION 1..103: note = TnsF-Tn7 System Protein
MGIVWGLRLRMAEHGLFQTTDLVPLLAERGIHLSREQVYRLVTQPPQRLSMDTLAALCDILGCTPNDLIEVEVANAQVRKTAEGTPTPPPPVRRSTIRRPDST

SEQ ID NO: 4528 - protein, 595 aa, synthetic construct
  REGION 1..595: note = TnsF-Tn7 System Protein
MAKAHAVFEGKAYCGTCYKREFKPVPCAECGRTVRTLQGRGPATCKCCRSKNRSCLRCGKPVPRAALTLDNGVACPSCARYYKPAKACANCGQRSQHLARDFKLGFEEPVCPKCRRKGHATCACCGKHRAPAGKDDEGRPLCQGCLKRKEPFTCPRCGRQGRYHSQERCSDCYWGDRLGKKISDNLWIMNQRWLRDAFQEFGRRMRIDGKAQKIAVDLDRHVKFFHLLDQNFSCPEEVRPRELIRVFGLDGLRRASLPFGFLVSENYLPEMLVEELRREAEFQRQESILEDAEDAWFHPVLKRFHLSQSNRRKRFESRGWEKEFQRYAPRSVTQDLKAAVKFLKFLPPEIGSIQEISEKHLDAFLLNHPGYRNGLRNFIWHLNQHEKTFVRFKIPTTKQGRKIALVLGQDKFHDLLESWSHAPDREVNTALIALFMMLYAQKARRVLRMRLSDLHHNPDGSFSTTFGDVEIPLSEILTPLIERHLEQREKQRAREGHDLEPYLFPGRRVGSHLSESSVTQYLHRYQVSAAMLFATWMFNALSNGLRQAKTLKRAFGVSDMTAAGYYEVFGARLFDEVSGKMRGNDGPLFFLEVGS

SEQ ID NO: 4529 - protein, 421 aa, synthetic construct
  REGION 1..421: note = TnsF-Tn7 System Protein
MHLTVDTSAKCHIIPATFIKCTSVPLNAFLIHLELPITRLSRSAALDRKGDPMTHPHHLKLAPHTEGNFTLPAEDTALLNEIIEGYKARRIGARRYNKKSVEGELAVVRDFINHSQMSPWHWGDSDFEAWCNEIGVNRKLAVSTQRKYQSAVKIFLDYLVNNQGLRNKVKELCGVAPRQICHRDNMIQHKLDRELARKKPALTEEQVKHLLDGIAEGIDLAWRFTSKALIPLQRDKALFSLVYGLGLRASEACNLDLEDFYPNSDLPQLGRFGFTRVTGKGSRGTGPKFRTVQIMYEWVAETLCWYIEEIRPRLLKHAAPNEKALFLSERGTRLTRSSLDNRFQEAVTLSGLDGLGFTPHCLRHSQISHAQDTGLSLEATRRMAGHAFASTTQGYTHVGDRAVQNEIAHRVNNPQRQQHHY

SEQ ID NO: 4530 - protein, 678 aa, synthetic construct
  REGION 1..678: note = TnsF-Tn7 System Protein
MSELDKKINEHFPGLVVRKDLVKTVKGNAIVPSYVLEYLLGQYCATSDEASIQTGIQTVREILRKHYVHRNEAGLVRSTIKEKGRHKVIDKVTVDLNDSKGVYEATFSNLGIKKVLVTTDTIKKHPKLLVGGVWCICDLEYDLVEEKDACPWIMASIKPIKLSHFDFDSYLEARQKFSTDEWIDLLIQSIGFNPDLMGRRSKMLQLVRLIPFCERNFNLIELGPKGTGKSHIFSEFSPHGILISGGEVTVPKLFVNNSNGKIGLVGYWDTVAFDEFAGKQKRVDMALVDIMKNYMANKTFSRGVETLGAEASMVFVGNTSHTVPYMLKHSDLFCDLPDKYHDSAFLDRLHFYIPGWEVDIIRGEMFSDGYGFVVDYLAEILRSLRNHDYSQQYKGKFDLLSDISTRDRDGVHKTFSGLMKVLFPSGEASPEEIEEILTFAIEGRKRVKDQLLRIDKTYTKVRFGYERAGGDTIFVKTLEEEEYPRHYGTDEEKQTEADAGSESATEHATDQKSETDEPKAQHLQFKENQRGVSYDMLFTPYLRGATRIEITDAYIRLFYQVRNLMELMETVARCKAEDAEPSVHLVTISDEFKAEQQHEMLTQIQNSCAAIGIQFTWEYDLSNSIHARHIVTDNGWKISLDRGLDIFQQYQMNDTFSFGNRMQEFRTCKAFEVTYLRP

SEQ ID NO: 4531 - protein, 451 aa, synthetic construct
  REGION 1..451: note = TnsF-Tn7 System Protein
MLINFTLNNWRSFRQQAEFSMVASREKQHGDRLARIERYKLRLLPVAAIYGGNASGKTNFFAALNFAKNLIVDGTRPDELIPVESFRLDAGDAKKATYFKFELLVDETIYEYGFAVSQERVFEERLVEVRPTTEKELFVRELDEIRFNPTLNEDQFLHFAFKGTRENQLFLTNAVQQKVENFKPVYDWFKNDLVLIAPDTRFEPFEQFLQEDSPLYETMNKCLGLLDTGIAQLGGEDVSFDNLALPEEIRTKLQASLKDGMTLRVMSPFHERYVFTRKKGEIVARKLVTYHENRGGELVKFEMGQESDGSKRVIDLLPAFLEMSSRKSTQVYVIDEVDRSLHTLLTRQLLQGYLSACSADSRSQLLLTTHDVLLMDQDILRRDEMWIAERDADGGSSLLSFSEYKDVRSDKDIRKSYLQGRLGGVPRLLISGALANGDLDLPEKEAAVGEA

SEQ ID NO: 4532 - protein, 595 aa, synthetic construct; identical to SEQ ID NO: 4528
  REGION 1..595: note = TnsF-Tn7 System Protein

SEQ ID NO: 4533 - protein, 263 aa, synthetic construct
  REGION 1..263: note = TnsF-Tn7 System Protein
MLAKVLSGALIGIDAYPVEVEVDIAMGLPQFATVGLPEGAVKESKDRVKSAIKNSGYEFPSRRITINLAPADVRKDGAAFDLPMAIGLLRATGVVKGQSERPYLFMGELSLDGRVKPVRGALPVAVAARGWNLAGLVLPEENAREGGIVEGLPVYGVRDLGEVVDFLNGERELAPCRVDSGEIFARAAAAPEDFAEVRGQEHVKRALEVAAAGGHNVMMVGPPGSGKTMLSRPTTGSSFSTSCQLFFNPPKLPNNTPRRPQRA

SEQ ID NO: 4534 - protein, 263 aa, synthetic construct; identical to SEQ ID NO: 4533
  REGION 1..263: note = TnsF-Tn7 System Protein

SEQ ID NO: 4535 - protein, 469 aa, synthetic construct
  REGION 1..469: note = TnsF-Tn7 System Protein
MHKPQLNTCSVCEKQLKIIRNYRAEAYCSNCYPQWFPQKKCKICKKIQRIHLNGQLCLNCERLTDCARCGRQAGLFSIGKITNYGAICKTCYLYFRERKECAECGKLSRNVSRSPLANHNQLLCLSCYRKYSFATCKNCKRYRKIDNKRKQLCIKCNNVLLSACSRCKNEMPSGYGKICSTCTKRTLLFKLIRINTRLFHNKEIITAYKKFIFWCIDKFGVSLALHKSNSHVSFFITCDDNWRKIPDYSVLLTYFRPNGLRHHLTVLRWLIDNNLLVIDEKLKAEIAETDKIQALFNKLQNPIPCIDSYYKHLKRKYNDGKTSIKSIRLALQPAIDLMSSQTKIVLPTQTQLNNYLALKIGQTAAISGFICHLNEAYYCEIEIDRKHIQTIKSKILRKHCDQILIALYQQKTLTESEKIELIYAVLYSLHNVLIRYPRKENILELEGAYYYHENAKMYFLPTDVYSRLI

SEQ ID NO: 4536 - protein, 220 aa, synthetic construct
  REGION 1..220: note = TnsF-Tn7 System Protein
MSVEKTFQQVRKIKPTRNSVSGHLPFKSDISLPYESTLERDFLIYFTYLQSVEEIVSQPTRIPFIKNGVTYSYTPDFFVRFNDGRKSMLIEVKPTSKWRANWQDWKEKWKAAIAVCKENGYVFHVYDENKIRHLALFNINSMQRYKRLKCEQADIDAIMNQVMLTGGTNIDNLLTRFFTGSLYRTKGLQVIYHLLATKKLACNWFDPINEFSEVWSYENG

SEQ ID NO: 4537 - protein, 650 aa, synthetic construct
  REGION 1..650: note = TnsF-Tn7 System Protein
MDNELFEKGIIEQREHNRLQRGRIILKKGNIYLHRDDGNQYELIEYLDENAQVMIRNLHTRKSKIASIYQLENIKINEREDISVDLSTIDEDYWEKALKKYEAIKPLLNAEQYNPNAIKKRAQTVGVSDRTLYRWLQAYNSIGSIAGLVDQKRGWQAGSSRLNKEQDELVSQVINDFYLHKQRPTIEQTIREVQRIASTKKINSPSKRTIRKRILQISENERLRKRGQKEKANNKFTPKPNSFPNADYPLSVIQIDHTPVDLIIVDNKYRKPIGRPHLTLAMDIYSRMITGYYLSLDEPSVTSVAMCIARSILPKEKLLLDHNVKGEWNVFGYPNKIHVDNGADFRSLDLAKSCEAHGIALEFRPVGRPEFGGHIERVIGTFMKEVHNLGGTTFSNIKEKDNYDSEAESIMTLDEFETWLLNFIVNIYHKRTHSSLGISPVQQWSLGVFGDEDHIGCGYPQMPVDEQTVLLDFLPSMRRTIQPNGVTIDGLRYYDVALNMYINDTDEDNKSKKFLFRRDPRNIGRLWFYDPKLKCYFPIPFADQTLPDMSIWEYKQVRSYIKKNNSEKYVHTQQINEALTAMREHVNESAQRTKKARRQAQRQKTHKKSKSIINTKVQNIKDQEPVMKQAKTLNDGLLSNDAEFSFGDVE

SEQ ID NO: 4538 - protein, 497 aa, synthetic construct
  REGION 1..497: note = TnsF-Tn7 System Protein
MSGKPITKQQVNLYMSYRKDHKQTTAAAQSGMSERTARRIDSGQHSTENTPRIYRTRKDPFDGAFEEHLVPLLKADPKLQPITLLDQLDTLMPGKFGHNHLRTLQRRVKKWLATEGPEQEVIFRQKYMPGFMGISDYTWMNKLEISIAGQVFSHKLFHYKLVFSGWTYVQLVFCGESFESLSTGLQNAFWRSGGVPQTHRTDSLSAAFNNHYEQETLTERYQKLCAHYSVVATRNNKGVAHENGAIEVAHSHLKRKVDQQLRLRGSRDFATITEYQSFLDVIVAKINRQCKTRFDEERKHLNDLPKRRTNDFCEQYVKVTSSSTISVKRVTYTVPSRLIGYRLLVHIYDTRLDLFLGHEKTLFLTRVYAQGHLRSRAVDYKHVIHSLAKKPNAFKYSQLREDLIPEGDFSLLWQQLTSEHVSDKDCRYMVELLLLAHNYNCEQALGRYVLKNHEQGKRITIDMCRKLFGPSTVVIPNIVSHQHKISDYDSLLGGLHG

SEQ ID NO: 4539 - protein, 229 aa, synthetic construct
  REGION 1..229: note = TnsF-Tn7 System Protein
MTLIGNFYSSSNPKPGEISLAHNGVLFLDELPEFERKVLDSLREPMETGTVTISRAARQMEFPAQFQLITALNPSPTGCHNDKRATPDQVMRYLSRVSGPFIDRIDLQIELPRLTSVELQSSKPEETSAVVRARVEAAYYLQLKRQGKVNARLNNKEMSIHCDLASTELQFLARASEKLALSPRSYHRIIKVARTISDLKGAERISLNELKEALNYRAFERLLAQLTKY

SEQ ID NO: 4540 - protein, 373 aa, synthetic construct
  REGION 1..373: note = TnsF-Tn7 System Protein
MGTTNTRLTKNYRIKDSSIKTAIYPDESITSWLIRSALDCGTEPLVFTGFYWSEYRLWTYDLDRGFESIEPQIYTDITSLSINDSVKLQSHSLYSILYEINGENTFINGSPKWIIPRSSRNRIHHIGQFFCPYCLGEKSYLRNQWRLAWNFGCLKHNVLLKNKCNDCKTLYQPHLLSADNRHLNNCHKCGESLVTQQSTSLNQSQITALKKLNITFKKDIGSCLGHSVNKKTYFSVLRYFINLLRRAAIIKSTHAIALFIEKLNIKHEELCSPKTGLTFELLPLTERESLLINAFSIINLTKSEVVTAIEQSNITQKALSFEPYPKELQLIFEHALNSKVASPKKTRKVSTESIAYLSRKWERIKRKLHIDEQ

SEQ ID NO: 4541 - protein, 469 aa, synthetic construct; identical to SEQ ID NO: 4535
  REGION 1..469: note = TnsF-Tn7 System Protein

SEQ ID NO: 4542 - protein, 297 aa, synthetic construct
  REGION 1..297: note = TnsF-Tn7 System Protein
MNELYTYVHEKFRHLVTAPNDIRIAFLDEPRWIGYDIAKDIIENLVSLMNKPKRPRMLNLLVIGDSNNGKTTLIRRFYDLYGESHVDSHSNGIRPIILAEAPPSANEKELYVSLLERFYVPYRPTDSLVKLRYQTIHLFREYKVKMLIIDEFHSLLVGTPRLQRQVMNAIKMLCNELQIPIVGVGTRDAIRVLHTDPQHASRFDVAELPTWKLDHKFQQLLFQFQSVLPLQNCSNLQDPALAAKIHTISGGNLGNVHRLLVACTVEAITSGTEQITLAIIEKHSWVQPTQGLRKIIG

SEQ ID NO: 4543 - protein, 297 aa, synthetic construct; identical to SEQ ID NO: 4542
  REGION 1..297: note = TnsF-Tn7 System Protein

SEQ ID NO: 4544 - protein, 255 aa, synthetic construct
  REGION 1..255: note = TnsF-Tn7 System Protein
MANVQSLPILLKELRLSAIAKEWEALAQKAVSQEWEPELFLAELCELEANHRHESRLKRLLKESKLPVGKQLHQYNFDEVEGVTSLQIKQKVSQIDWLRQGHNILLFGASGLGKTHLACAIGYSLLEKAVRVKFSTSTAIVQELQRAKETLGLNDALRKLDKYELLILDDIGYVKKTDSESQVLFELIAHRYERGSLLITSNQAFSEWDNIFGDNMMTVAAIDRLVHHSNIYQIQGESYRKKQAMKLNSNTGQVN

SEQ ID NO: 4545 - protein, 255 aa, synthetic construct; identical to SEQ ID NO: 4544
  REGION 1..255: note = TnsF-Tn7 System Protein

SEQ ID NO: 4546 - protein, 507 aa, synthetic construct
  REGION 1..507: note = TnsF-Tn7 System Protein
MSPSYRTADQYERWHKAHCARCGRFGCFAATWPDGKVCRTCHDRALRVRGRCPGCGDNRPLPGLRPVDHAPICADCAGFAVSYHCSRCGHEGKLHGRRLCTRCTFADELTDLLSDDTGRVRTELAPLAAHLLTMSSPLSGLCWLKHRKGRDRAPADLLAELGRGEIALTHEAFHTLAPWRAAAHLEELLMACGILPQVDKQICAFERWTIRHLASVTDPEHARLIKRFAAWDVAPRLRARAERNPLTVSSRRGFSDQITQATQFLGWLAEHDLELADCGQADIDAWHVEHNVHARTSIRGFLHWCIANKLTRRFRLPTVVIGPATPMPQQQRIDLLGRLLTEPDQPLRSRVAAAIVLLYAQPVSRIVRLTLDDVIADSDTVRLRLGDPPSPVPGPVAELLLSWIDQRTNMNTATNREARWLFPGRRAGQPIHPETLGALIKALGIPSTAGRVGALHQHVLELPAPVVADALGYHHKTTTRASTDWSRYASGPRARKPSGWTPRTRDR

SEQ ID NO: 4547 - protein, 507 aa, synthetic construct; identical to SEQ ID NO: 4546
  REGION 1..507: note = TnsF-Tn7 System Protein

SEQ ID NO: 4548 - protein, 383 aa, synthetic construct
  REGION 1..383: note = TnsF-Tn7 System Protein
MRSTEVAGLAGFGGSVPGGARLHLVDGVSLLRPEEQVFEAMLAGFANQQLARNLARTTVEGRENTVRAFTAYVNTFPWQWAPAMIDEWLGDLRSLRDLKRSTIRSYSEAIRSFCHFITDPLYEWPATCETRFGTHPIQIVHEWNTAVHAQDTESDPKKRAFTKAELHAFFEHADSQVARIHAFGRKGWLPAFRDATLFKTAYAFGLRRNEIRMLDAADFGANPHAREFGQFGRCQVRYGKAKKGSPPKRRGVLTVWDWTPEVLEEWFTEIRPLFGVDGNPAAWPSERGLRIGCQRLNSRFAAYRDALGLDTGLDLHSLRRSYVTHLIEDGWDPRFVQEQVGHEHASTTSIYTCVSSDFRTRTLRRQLDATIAAALDSRKGMNA

SEQ ID NO: 4549 - protein, 112 aa, synthetic construct
  REGION 1..112: note = TnsF-Tn7 System Protein
MKRTVGYTWRLRELMATRGKFNATELVPLLHERGINLSASQVHRLVSGTPERLSLQVLSALCDILGCTPADLVATTAENAGVSRTATDDLPGPIAANVAKLRPRAARILPDA

SEQ ID NO: 4550 - protein, 230 aa, synthetic construct
  REGION 1..230: note = TnsF-Tn7 System Protein
MSRLRLPDRCARCNQTGARIATTWPEGRTCRRCYQRATRIHGICPGCGDDRLLPGLIDGQPGCADCAGIPKDFHCTRCGREDEPVRTGLCAHCCLIDDLTDLFDDTTGQTNPTLAPLFDALTQQAHARSARVWLSKNPHATKLIRDLARGIIPLEHATFTKHSDPRKVAFLRELCIEHGLLESVHLDIEHFQIWVNTKTEVLEPNDGRLVKQFARWVHLNRMQRLAPPAS

SEQ ID NO: 4551 - protein, 346 aa, synthetic construct; identical to SEQ ID NO: 4183
  REGION 1..346: note = TnsF-Tn7 System Protein

SEQ ID NO: 4552 - protein, 108 aa, synthetic construct; identical to SEQ ID NO: 4184
  REGION 1..108: note = TnsF-Tn7 System Protein

SEQ ID NO: 4553 - protein, 851 aa, synthetic construct
  REGION 1..851: note = TnsF-Tn7 System Protein
MSVQSREAPPRFLTDPRTVIAEAVVATDAGIAPETVALEIVRVADTRAKQRRLARALAEDPELLSSGRPEGPRQVEDLIRALLPHGSTKLVLPRCAGCGQQKRLSRTNGTRRMCAYCGGKTAGQGQLRLPCSICGKSLKVVGWDRDGRPRCQRHRPGQQGEVEEICLILHKAGTGLDATILKDLVTRALPLPSQQRSVLVELMRRPGLLTGEGAHGSPRVIALINALLTQHAQGITAPSCPFCHRRAELKYRRDELRCCRNCYDEARMESCSDCGRPTRVNRRTPEGGPLCCSCARRDPVDHELCAGCGRLALARHDTEGKPWCKRCWRDPLAVCSVCGILKPCHFAGTDAPRCPACTARRNTAPCSLCGDDRAVWARAANGGPLCERCSRRREPCAQCSHTRPVNSRGPDGGALCKVCYPKHPISFRECSRCGSHERLHHHGICPACAADRQLRALLTGSDGILRTPLEQVAAALAASPPSSLLLWLGRPGTQQLLGILASGAGPVTHAVIDQLPRSKSIFYLRAALVAHDVLPARDEYLAMFEHWLPRTLEEIPDPEERAIVKRYGTWFHLRNLRRRARRRPLTQGQLTTARTDIRAAMRLLSWLHEHGMSLATCTQADIDVWLSGGQKGRTVIRNFMIWCSARGYCCRFEIPTHTTTRGQEVLPEADQRWTISKRLLTDTSLDTVDRVAGCLVVLYGQRISRIAGLTTDQVKETSAGLTLILGSAPLNVPEPLAALIRELVRRRRGHAALGHTDAHPWLFPGARAGRPMSAEHLGTRLNRIGLRGRAGRNSALLDLAAELPAVVLSNLLGIHVETATAWAAEAGNIRPGYAAELARRAREHPAHSPPP

SEQ ID NO: 4554 - protein, 851 aa, synthetic construct; identical to SEQ ID NO: 4553
  REGION 1..851: note = TnsF-Tn7 System Protein

SEQ ID NO: 4555 - protein, 703 aa, synthetic construct
  REGION 1..703: note = TnsF-Tn7 System Protein
MTDTAVPANTEHTGTPVPAVPKQPGTPVPAASPKAGRRLRTGDLRRVVVEAREHATYRALVRHGAYVLGGTRVLTRRAWEARTTAMHSRMMRAAEIAGNEELVRQWEQRAYAYRFARHKRRMDILQMMLNAPKAIGSAVLTGAGVLFVLGLMLAGYNHDVRDVLTPLATVVEFVGWVAFIAGVLWEPLLYSLPLLALAGVWAVGRHRQTAPSWALPTGGDERDIVPDEGAILRALGNLGIAPLNKAIKDGWQPRWEQPTTRSGNGWHTQLQLPMGVTVEMINQKKKVLAHNLLRKPVEVWPTEPPRQPGTLDLWVADQGSLSGMVPPWPLLTEGTVDYFKGVPVAVSQRGEPIIGKLMAANYMVGGIMGSGKSSLVIALLLGAILDPLVIVEAYVMAYNTDYDPLRPRLRKLVKGDDDEDIEAALRALRNLRDEVTLRGKLLEELGDGATKVTRELALKDPRMRPKVVVFDECHELFMHKEYGKEAAELAIKVMKKARKTAITLVWVTVSPTADSLPRDVTRNTSHRVAFAVGDHVANDGLLGSGKHKAGVTATTLIPGEDVGTAVTVGFSSKPFEVVRAHYVARDPDKGIDEVTPVVTRAMGLYEGGTAVDEPTFQPADPLADVAAVLGNEVRVLAVEVLHRLAARNPEAYGSWGPTDLKRALEPFGAEQYKSNGVMVVARDRVQDAVLERLAEDVDDYDDE

SEQ ID NO: 4556 - protein, 703 aa, synthetic construct; identical to SEQ ID NO: 4555
  REGION 1..703: note = TnsF-Tn7 System Protein

SEQ ID NO: 4557 - protein, 371 aa, synthetic construct
  REGION 1..371: note = TnsF-Tn7 System Protein
MVRRGEEPPGSARLLLIDGVSLLHPEDAVFEAMLEGWEKQQRGRRLGVDTIGERVRVVRRFTEFSGEYPWRWTAAHMDEWSTTLIAELQRARSTIRSYQGAIRQFCDFLTSPHYTWVSECEKRFGTHPVQICHEWNTAAHLDEYEGDADRRPMTREEIQALFDYADDQVEHAVRRGRKGALQAYRDATVFKTIYGWGLRCREVSRLDVTDFYRNPKAPELGRFGLMTVRYGKASRGSGPRRRTVASVMPWAVESLEDYLVNMRPRFRHQAGHKAVWLTERGGRLQPREIEERFAAYRNALGFDEDLVPHCLRHSYVTHLIEDGADPKFVQEQVGHRYASTTAIYTGVSNDFMNTMMRKALDRAFAAEGEMA

SEQ ID NO: 4558 - protein, 115 aa, synthetic construct
  REGION 1..115: note = TnsF-Tn7 System Protein
MTAKLDYQWHLRELMAQRGMFSTTDLRPLLAERGIDLSASQTYRLVTEKPERLSMKTLMAVLDILGCRMEELIEPVRATAKARRTASDQAPADGTAEGGVGSFRPRRARILPDSQ

SEQ ID NO: 4559 - protein, 755 aa, synthetic construct
  REGION 1..755: note = TnsF-Tn7 System Protein
MRARLVALLQNTIGPSLTEEEAQTILERAKAWSPPMARELEAHIAEHPQALTAPSPHCPGSLPRLLQTLEAAGHGDAVTQLDCPICGRTLRKVSRPTPQGRACGWCVARTELRPCSRCGENGHIVTRSEEEGAICRTCYVNDHRFTGPCADCGRHGTYRVRHREESLVALCRRCAGYPDRECARCGTIRPVQAKSPEGPLCSRCYTAPAKLCGKCGQVTQLAKRGKNGEPGVCHRCYTFEGVCTVCGRFRDGAHSKRAGGAFLCDPCRPRPPRRCVDCGRDKKATVTTWPVGPLCSPCYNRRRRTPEPCSLCGVARVLVGRSDDGGGTCGRCCGTDIDFSCRRCGTPGDILGDGCCVRCVTGDRVGNLLAGEDGQIVPALAPLAEALATAPRPRSVLAWLRRSPSARLLATLSAGHAEITHELLDDLPQDAATRHVRDLLVHTHVLPKRQEYFNQLELWFRRTAQDLPAAHIEIIRPFAEWFVIRDARRRADRGRYSLNAATADRNEIRAAIEFMQWLDSQQLELTGLTQSHLDTWLTQAKTSQRRANAAFIRWTNKRGLTQNLEYPGRPMAMPVLFLDDEEHEDQLRRCLTDGSLPLELRIVGALIRLYGLPLIRIVHLTTDGFHQDERGAYFTFDKNPVLLPPTLARLIEEQIATGRSRAALGPLATREHPELLLPGQPASRPRSPEALSGQLMKHGLPTIAARNTALVGMAGELPPIITSDLFGVHRNTATQWAALAQDSWAGYLAALRAIK

SEQ ID NO: 4560 - protein, 755 aa, synthetic construct; identical to SEQ ID NO: 4559
  REGION 1..755: note = TnsF-Tn7 System Protein

SEQ ID NO: 4561 - protein, 342 aa, synthetic construct
  REGION 1..342: note = TnsF-Tn7 System Protein
MLEGWARQQSARFLKEKTVRPRLRLIKRLEEFTGLYPWQWTPADGEAFIAHLRSGSDPIQMSTARTYEVTVSLFLEYLLDARYEWIDTCLERFGEVPQEVFHEGNSVLHTVEYEADPRRRPLTYDEVQALFDAADARPSRIRGQGRKGTLAALRDAAVLKTVYAYGTRRTESSKVDLADLRRNRKMPQFGKYGSVMVRFGKSSKGAPPKQRTALLIPEMDWVTDSLDHYLTEVRPQFSPGRHPALWVTERVGRLSPRSINEAFVAARRDADLDEDLDLHCLRHSWITHATEFGYPARFVQENVGHSHASTTAIYMGVSNEYRNTMLEASLKNRLGDYWDVTP

SEQ ID NO: 4562 - protein, 108 aa, synthetic construct
  REGION 1..108: note = TnsF-Tn7 System Protein
MIKKMGYQWQLRQLMAERQMFQTSDLVPLLAERGITLSREQVYRLVTQAPQRMSMETLVALCDILDCTPNDLIKPEIVNIQVRKTADDETSPAPSAPRRTVIRRPGQS

SEQ ID NO: 4563 - protein, 806 aa, synthetic construct
  REGION 1..806: note = TnsF-Tn7 System Protein
MTTADQLDRVVADPIGLITDLVADTEKELDPETIRAVVTTVAGGRAKSRTLAAALNRRPALLGDGRSPAPRALGDLLIALRQAGAQAISPPVCTECGKHLRTLQRRGQDWYCGVCGPVYVDCSTCGKNRRISTRDRSGQPRCAKCPDTDGRDPLAVVHSVICDLDPLVDVVLIADAIRRTMPRAADQQKLAWALEADPSLLTGNGHLAPTPAMVRLINVLYDSDVTGIVRPACPLCHRVVRLHKPLDGQRVCRNCIAKSRVEECVRCGAHREPATRDTQGRPLCPNCLITDPANAEVCIGCGERRRVQNRTTDGPLCPNCKPLPILVCSICGRTAPGTRSRLTGQPRCGACDQRQAHCSSCGHIRGFHSGTLEEPVCGPCTAPDAELWRPCPTCGEADRLRSSGPCPRCTLKQRLHELLTNGSGSIPPKLQALHDALASTERASTGLRWLSGGIVSTVLSDLGSGNRPLTHEALDELPEGKVVEHIRSVLVASGALPTRDEQMARLERHVKDLITSHATAEGRKILHRYATWHLLRRLRRRSRGKETTYYQLQVARQHLRAGVYLLNWLEGQNLALATCRQADLERWTTSDDARLRQEAGHFVRWALAQKIARDLTFPAERWNGPSQPMDDEARWATARRLLHDDTLKPEDRLAGLLLLLYAQWPAAISRLTVDHIEETNGAVRIRLGAVPVELPAPVAELALRQVEVRRSHAVLARTDSPWLFPGGQPGRPISAWAMGERLRKLGIRLAQARSTALFQLATELPAAVLARTLGIDITVAVKWQRAAAGDWAAYAAEISHRTSTQE

SEQ ID NO: 4564 - protein, 806 aa, synthetic construct; identical to SEQ ID NO: 4563
  REGION 1..806: note = TnsF-Tn7 System Protein

SEQ ID NO: 4565 - protein, 208 aa, synthetic construct
  REGION 1..208: note = TnsF-Tn7 System Protein
MRDTELQELIRQVYTDNYRVYGARKIWRELNRQGHEVARCTVERLMRELGIAGAVRGKKIITTVPDQQAERAPDRVDRDFVATAPYRCWVADFTHVATWAGVVYVAFVVDTFSRRIVGWSAATSKETQLVLDALEMALWQRDRDERPYVRGELIHHSDAGSQYTSFKLAEHLDAAGIAASIGSVGDAYDCQSVRTGSRKDRVVLAVTV

SEQ ID NO: 4566 - protein, 367 aa, synthetic construct
  REGION 1..367: note = TnsF-Tn7 System Protein
MAHQQKVALAGSARMELVSGVVQLRPEDAMFDAMLRGWRAQQKSRGLKDETIDPRERLIRRFLEFANEYPWQWTPAHLDEWSATLTSEKHLAPSTIRSYQGTVRLFTDLLIDARYGWGPACDEAFGTFPVAICHEWNTLPHLQDYEGDPEARPFSREELQRFLDYADDQVVRAVKSKRKGALAAYRDATLFKVIYGWGLRRTETSKLDVVDFGRNPQARQFGRYGTLNVRYGKAKKGQQPRRRNVLSVMDWAVEAVADYVENVRPRFGFPDHPALWVTERGGRLQPGSINDRFEAYRDALGLHKELTPHGLRHSYVTHLTEDGVDRRFIQQQVGHECDSSLAIYTHVSDDFMNTALHKALAPAFAGA

SEQ ID NO: 4567 - protein, 117 aa, synthetic construct
  REGION 1..117: note = TnsF-Tn7 System Protein
MAAKLDYHWHLRKVMADRGMFSTTDLIPPLAERGISLSSSQVYRLVVERPERLSLKILMALLDILDCTMDDLIEPIAVAGAVKKPKKAAVGGGPSSGSEGLGGLRPKRARIRGVDRS

SEQ ID NO: 4568 - protein, 849 aa, synthetic construct
  REGION 1..849: note = TnsF-Tn7 System Protein
MPFQLATALHAAGIILGVPGCSHCGRARVLELYGSPEPTCHSCAKRNADGSSARGPRNRTSLKACPAGRHHMGRTARLCLPCADEQATAVIEAAVVEAGVPTGRARTIVAETATPPRALRQIARWLQAGGSLADPGAGTVVIQRFRNRLSTQLPAIKHTTCPSCRQPRAALRNRDGDDLVCLNCYFRRHREICRSCRREKSVAWRDEDGWAWCGNCRATHPEAMKPCSLCGRLGTVAARGDAGVIGHCCYTYPQDECRSCEQRRRVAVRTEDGPLCQRCATRPLEPCVRCGEVRWIPRLKTRGRAGWCVICVELPVLLDEDGLAAGDEAAAGIGEPGAVCTGCGTKNSVVYMPDGQRCQDCRMVAMRRREGCSRCGRTRRVFFDPGICADCLGIDIGGVCAACGMEDLLYAEGRCASCELARRADRFFGGTGEPGRAVARRLAASTRPVSTMHWLARSPVVPVLADLLRRPEPLVHEDLDAIVTPTRTDGRTDRRQAIENARLILVASGILPARNELSHRYETWAHQVLATVEPASERWLLLQFHRDQVLPSLQSRCRSGKATTGSLSWAQKQLRGAADLLAWWRPKGGIADLARADVDTWLAESSTHYGARDFLLWAIRRGLVDFPRSAVPRRPHKSPTAIEDHEVRADLVRTLLHDEGYPTDIRVAGLLVALYGQHLSRIVRIECSQVETDADPVRIKLGSQWLELPEPFGNHLRELIASGPRRRTPFTDQTRWLFPGYGAGTHLSASRMGIRLAAHGIRATPMRNMALFQIAATVQPSTLGRLLGLHPVTAVKWVNESGGVYANYWSQFLAEGHSGDDDLVDLEDGDADDEPDEDPLDLLDELGIQ

SEQ ID NO: 4569 - protein, 354 aa, synthetic construct
  REGION 1..354: note = TnsF-Tn7 System Protein
MQGSPQQGRQAELFDDMLRGYGTMLIAAGRDRQSVGKTLQMIRGFVVWSDAWPWEWTTQDVDEWSADLRDREIALSTLRSRQGALRRFCEYAVNPQYPWIERCLAAFGQVPTQVCHEWNTTRHLEEYDHRPERREVSRDELRLFFNHVDDRVEQLVEANHKGAAIAWRNATMFKIQYATGVRPGELVKLQTCDLLPHPVAPQLGRLAVVRVRWGKRSKGGTYRQRGVQMVLAWAVEALRVYLEDVRPVFPDGPWLWPSERCDVSGRQQPITTRTYQTAFAERRDACGLDANLTPHCLRHSYLTHTAEAGRDAAWRQRQAGHKLASTTSNYTHIGEDHMNREMAAAIADLTARTR

SEQ ID NO: 4570 - protein, 508 aa, synthetic construct
  REGION 1..508: note = TnsF-Tn7 System Protein
MTDFKPRGRPRTTTAGYTCDRCGRETGKIRLRWPDGRICGICFSNAVHTFGECPLCGQHRMLPGRLESGDNICAGCAGITTNLTCDKCGRERERFRGGQCIVCVVESELLALLRPNDPADLRLKRLVSVLTTVERPESIHTWLHSNGGVSAELLRRLGDREIVLSHEAFDALPKNPAVEHLRAILTHNRMLPAQDDGQLAMFEQWLDERLEQLNATPDIHSPIERFGRWHHLRRIKAASSETKNMNYAVRTAKQEITEAGKFLSWLFDFHGKTSASIRQIHIDEYLSDGPSTRKHIRNFVRYLGREATVKDVDVPVRLAQTTPLLTQRQRMAHIKTLMEAVNVNESTRVAGLIFLLFGIPIGRLSMMTLDQIDVRPTGITIKLGEHPAPIPAALIPLFLAHLRTRDNAGTVNTGTNWLFPGTRAGRPRSPNTLLLQLRVKMGIDIQGVRNRTIRGLVEEIDPTSLSRMLGYSKQIMSKHGSAATVPWSSYVIDKNPRYAKEKPSSQGR

SEQ ID NO: 4571 - protein, 508 aa, synthetic construct; identical to SEQ ID NO: 4570
  REGION 1..508: note = TnsF-Tn7 System Protein

SEQ ID NO: 4572 - protein, 394 aa, synthetic construct
  REGION 1..394: note = TnsF-Tn7 System Protein
MELATNPFKPGAGRVPPLLAGRSDLLREFRNRLYQARETGEGERPWILSGLRGVGKTVLLNQLGRDAAELKLVFVKVEASSGKPLAVALAKELHLALRRILSSSDRAKALWSKAASVLHSFQVRVDPSGTYSFTVDVDPEPGVADSGDLAVDLQELLETIGLAAREANTVILLAVDELQEASFEDLAALNVALHNLGQDVFPVPVVFVGAGLPSLPAVLADATSYAERLYDYRQIGLLDTTATSDALTAPTRANGVDWEPDALDAAVTATGGYPYFIQACGSHVWAVRATDTITLQDTQIGIESARTEVEQGLYQSRWERATPTQRAFMSAMASDNDAPSSMAELVTRLRKKRTTDLSVNRRDLIRSGHIYTPERGFVAFTVPGMADFITRQGQ

SEQ ID NO: 4573 - protein, 394 aa, synthetic construct; identical to SEQ ID NO: 4572
  REGION 1..394: note = TnsF-Tn7 System Protein

SEQ ID NO: 4574 - protein, 522 aa, synthetic construct
  REGION 1..522: note = TnsF-Tn7 System Protein
MSIERRAAREPVILEMRSITKEFPGVKALSDVSLTVTAGEIHAICGENGAGKSTLMKVLSGVYPYGTYSGDIVFQGKDVHFKDIRSSEAAGIAIIHQELALIPELSITENIFLGNEPTRWGAIDWIKAKKTALELLARVGLRDDPDTLIKNIGVGKQQLVEIAKALNKSVKVLILDEPTAALNEADSQHLLDLIRGLKGKGISSIMISHKLNEIEQVADSITIIRDGKTIETLDVVNDGVNEDRIIRGMVGRSLESRFPEHTPDIGEVFFEVRDWNVQHPQVPERMVVKNSSLNVRRGEIVGIAGLMGAGRTELAMSIFGRSYGNYLSGRLFKDGVEIELRSVSDAIDHGLAYVSEDRKALGLNLLDDVKRSIVSAKLSKISRGPVVNDEKEYAIAESFRTSLRIKTSSVDAGVNKLSGGNQQKVVLAKWMFTDPDLLILDEPTRGIDVGAKYEIYGIIQKLASQGKGVVLISSELPELLGLADRIYTVFEGAITNCILAAEADPETLMKSMTSARKKAYSK

SEQ ID NO: 4575 - protein, 522 aa, synthetic construct; identical to SEQ ID NO: 4574
  REGION 1..522: note = TnsF-Tn7 System Protein

SEQ ID NO: 4576 - protein, 378 aa, synthetic construct
  REGION 1..378: note = TnsF-Tn7 System Protein
MSREWFYATRKHVTEAGLPHALVARSSRPKTSPAKVSELVERLALEARARLGGAGWDNGPLSVKYELEKLGIESPSRSTLARIFTRNAVVTPQPKKRPKSSYIRFEYAAPNEMWQLDATDYTLRGGAVVAIFQLNDDHSRFQIASLAARSENAEDAVKVVTIGMNRHGTPQRLLTDNGTALNPSRRGWTGDLTALMLSRGVQPIASSVGHPQTQGKNERGHSTLARWLAARPAANDLAELQTQLDTFDKLYNEERPHQSLQMQTPHQRYYATPKAPEPTPPLAPAPLPSKPRQHARKTTPNGVLTVAHMRIQMGRDQANRTFNIVIETNTVHIFDAEGTHIITHPIGPKGSYVGNGKPRGFLANQPKKPQAPDEPATS

SEQ ID NO: 4577 - protein, 377 aa, synthetic construct
  REGION 1..377: note = TnsF-Tn7 System Protein
MADKMGGLSFLPLHDRGPDKDAFLAEVLTGWKRQQYTKNFVAKTITRRINRVLDFCDATGKFPWEWMPTDADEYFSHLVNVRGLVQETIRAYQSDISLFCDYATSESYPWNESCGRLFGSSMSQIITDLNKARHTQFATMAPEKRAFDLAELQQFFDYADDEVARIIGSRVKGGLAAWRDVTALKACYGWGLRHDELRKLDLVDFSPNIKAPYFGDYGLLRVRNGKANKGAPKKQRTVQTLVDWAAEAVAEWVEFGLPRYGQPITHLFPTSTGGLVAQGDLYSRFIGFANALGLEPGLDIHGLRRSYTTHMITVYGYDSKFISLQIGHANESTTSIYTLPSADYAAREMERVLTKDVLKSKGKLLLKPARHQGKASR

SEQ ID NO: 4578 - protein, 113 aa, synthetic construct
  REGION 1..113: note = TnsF-Tn7 System Protein
MKRQIEYKFHVRELMARAGIRTSRDLVDPLRDRGITLSESQINRIVAHNPDRIAFQVLVALCDVFGVEMNELVTYTSADVRTQRRKVAGDEAEIPLMEAYRPVRARIRRPEDD

SEQ ID NO: 4579 - protein, 488 aa, synthetic construct
  REGION 1..488: note = TnsF-Tn7 System Protein
MSERTPATCVRCRVTGPRRGVSWPEGYVCRRCYQQATRRHGPCPRCGQPRLLPGLDEDSQPICRSCAGIEQDFTCARCGQEDEPHRRGACARCCLRDDFTALLDDNHGHVPRRLQTFLTAVCEQAHPRSALIWMRNPDVRRILSGLATGDLALSHETFDHDPARRTASHLRELLMRHDALPQQDRTLLLFTAWLEATLAGYSPPARALLQRFATWHHLRRLRRAAGEGTLKPTASNAARQSITTAGQLLTFLEADGIEFSSMSQAHLDAWLATGPSTRYSARTFVLWAGRAGHLPALTFPHRAARSTPVLSQNARLALVHRSLTDTAQPPAYRLAAVLLLLYAQPVTRISRLRLDDIVTTPGATALRLGNEPAVLPAPVADLLTEHLSSRPNQNTAANTDSPWLFPGYRPGQPLHHSYLMTQIRDAGVHLLGARNSALRQLVLDMPPAVAAEALGYSPQVAEAHARDAGATWVTYASYRNQQPRRRVE

SEQ ID NO: 4580 - protein, 488 aa, synthetic construct; identical to SEQ ID NO: 4579
  REGION 1..488: note = TnsF-Tn7 System Protein

SEQ ID NO: 4581 - protein, 374 aa, synthetic construct
  REGION 1..374: note = TnsF-Tn7 System Protein
MAKDGTFVGVMPLHLVGREPLKHPAEQMLEAMLDGWRSQQLARGLSFVTIDSRERAVRRFHMHSNEWPWRWNPQLADEWFTDLRVHRHISHSTLRALQSSLRQFCWFITDPAYGWSAECERLFGTHPVQVCLEENTSRHVSDVESRPTKRAFTRDELQAFFDHADAQVDQIRQAGRKGALSAFRDAVIFKTAYAWGLRRNEVRMLDVVDFGLNAKAAEFGRFGVLYVRHGKAMRGSPAKRRGVLTVWDWAAECLEEWVTQVRGHYPTAGSEPALFPSERSGRVALTHLNRVFARYRREVGLDEALDLHSLRRSYVTHLIEDGFDALFVQQQVGHEHASTTSLYTCVSSDYRTSMLRRALDKTLSAANQLGQETR

SEQ ID NO: 4582 - protein, 110 aa, synthetic construct
  REGION 1..110: note = TnsF-Tn7 System Protein
MTRRPTYRWRLRDLMAEHDMFATTALLPLLDERGIDLSPSQVHRLVTQAPERLSLPVLAALCDIFACTPADLIVTDVQIAADRKASGGGGEVLDLATTGRPRRARVRRDE

SEQ ID NO: 4583 - protein, 495 aa, synthetic construct
  REGION 1..495: note = TnsF-Tn7 System Protein
MTSTSNTIASQYLCARCGDTNQRRRVRWPEGFVCRRCYQRATRCRGVCPCCALPNRLLPGLDTRGKPICTDCAGIDDPRLTCTRCGDQDEPHRRGLCARCCLTDDLTDLFTAPDADEITPELQPLLEALTTQENPRSAMIWLRNPDVLDLLTGITTRRYPITHATFADHTSPRIGRHLRDLFVRCGILPAYDRNLDRFTSWIDTKLATTDIRQARDTIAGFANWNHLRKLRTRAERAPLPEGAILSAKQEITVAIDFVNWLHNRSLELGSATQADIDTWIATGPTTRSSAMMFVRWCTRHQHMTPDLIFPHRTSRRTPVSSDTDRYTQLVDTLQRPDTPIWVQAAAVLLLVCAQPVTRIAALPLDVIATADDGQVMINFNADPLSIPASLAAPITALTRRRPHMNTASNHTSPWLFPGRSPGQHLNPQTMMKQLRNNGIDLIGARNSAMRELLRTIPPAIVANQFGFNPGTTERHALTIGTAWSAYPTLHENSEP

SEQ ID NO: 4584 - protein, 495 aa, synthetic construct; identical to SEQ ID NO: 4583
  REGION 1..495: note = TnsF-Tn7 System Protein

SEQ ID NO: 4585 - protein, 382 aa, synthetic construct
  REGION 1..382: note = TnsF-Tn7 System Protein
MSRGELPPGAAQLQLADGVAVLRPAEAVFEAMLTGWTRQQLARNLSPGTTASRISVLRRFRDFCDVDGPWEWTATQADDWVAELRGISGAAHSTVLGYQGAIRQFMAYLTDPAYGWIPQCEHRFGTYPVQIIFESNSARHVQEGARDPRKRAYTVDELQDLCDTADDLVEQRRDAGVKGPMVAFRTATMTKVAYAWGLRRNETRMLDLSDFGPNPRAPQFGQFGVCYVRYGKPSKGSPPKRRGVLTVPETAWVIDCLEQWIEHARPAFGRTSAALFPTERSDRISAGAISTSFAALCDQAGLTDPGLDFHSLRRSYVSMLVESGYDTRFVQEQVGHEHASTTSIYTFVSPDYRTRIVASALQSAADRLTAAKNTTAQQQKEF

SEQ ID NO: 4586 - protein, 116 aa, synthetic construct
  REGION 1..116: note = TnsF-Tn7 System Protein
MQYRIGYQWRLREVMAARGMNNISDLMTPLHEVGIELSASQLYRLLGNTPDRLPLALLGALCHVLDCTTEDLCDFRVDATPSRRTVSGTRGPAIAAVPDPSVRPKRARIHRPGSPQ

SEQ ID NO: 4587 - protein, 498 aa, synthetic construct
  REGION 1..498: note = TnsF-Tn7 System Protein
MSPAYDSREKYERWHIRTCARCGRRAAKSANWSDGPICRTCYERATRDRGRCPGCKTERLLPGRNVAGTAICRDCAGISRDFFCDRCGFEGLLLGGRLCERCTLSDQLTALLDDGTGCIHPQLIPLHQLLVSLDRPKSRLIWLRNRQVPALLRDLATGTVPLTHDAIQALPNWRTAAYLRDLLMDSGVLPHLDRRLLLFERWLAQRIATTADTEHARILQHFATWHQLRKLRAKAAKGPLGTSTTQECRQQITQAGAFLVWLAARHVALSACTQTDLDAWHAEKYATRRPAQAFLRWCMETRRMPRLIIPNHPTTNPHPMGQHQRVTALQRVLADDSTALRVRVAACLVLLFAQPVSRIVRMTTDDVLRDGQCVTLRLGDPPTPAPEPVADLLLDYLQALPASTPAINQNSPWLFPGRRASQPMNPATLRDALRKLGIPVEKGRTSAIRQLVLQAPAPVIAQALGYHDKSTTRIANDAGAPWKNYAPGDHNRRSPRLR

SEQ ID NO: 4588 - protein, 498 aa, synthetic construct; identical to SEQ ID NO: 4587
  REGION 1..498: note = TnsF-Tn7 System Protein

SEQ ID NO: 4589 - protein, 372 aa, synthetic construct
  REGION 1..372: note = TnsF-Tn7 System Protein
MGGNRLAPGAVGLHLVGDLPLLRPDEQVFTAMLDGWRNQQLARNLAFSTIEGREKVVRAFVRHADTFPWAWSPQMVDEWLGDLRSVRHLRRSTLRNYQGSVRSFCSFITDPAYGWAVTCEERFGAHPVQVVHEWNTAVHVEEAEADPSKRAFTRQELQAFFDHADDQVGRVRGRGRKGWLPAFRDAMLFKTAYAFGLRRNETRMLDSVDFGRNPEGPEFGEYGVLYVRHGKAKKGSPPKRRSVLTVFDWSAEILQQWNEEVRPLFPTAGSGALWPSERSARVGFSQMNTRFTTYRDALGLDDGLDFHSFRRSYVTHLIEKGMDARFVQEQVGHEHASTTAIYTCVSSDFRTRTLRRALDATMQAALRPARRA

SEQ ID NO: 4590 - protein, 111 aa, synthetic construct
  REGION 1..111: note = TnsF-Tn7 System Protein
MKRQVSYQWRLREVMATRGIFAASDLSPLLAERGIELSSVQVWRLVTQTPERLSLPVLAALCDILDVTPTDLIATRAENVAPRRTAASGGADVVDLANTIRPKRARITPDS

SEQ ID NO: 4591 - protein, 507 aa, synthetic construct
  REGION 1..507: note = TnsF-Tn7 System Protein
MRCAICGQMRVYSARWPIGHVCATCYHRGRSTPRPCASCSKIRVLVGHPDAPANDELLVPTICGPCSGSYRYSYVCLRCGGGEEPYKNLLCVRCALGDQLRTAFGDAPPGSPIETLTTALRGSRRPRSVMKWLTNPRGGARVLGELLDRGTPISHEALDTYDEREVWSLRRTLVELEILPEREDPLARLDVIVEKITADLAPSPRSIVRAYASWWYLRRARRRYEESGRFTYPQFRSAWQRIAAVRALLKWLESNAVPLGALDQPTLDAWLEQATHTQRAATGDFLRWAVRRSLVERLTVTYPERTEPTILLSEERRWAELRRCLTDTSIPDDVRAAGALLLLYGIPLQRIIELTRDHLVIEAGSDIVTAFRTTTGAPAVTVPPRLGRILTRLPAPIPSGGAPLIDARANAPSWLFPGRGTAGHVTFTGLQARLRTHSLSVRQSRNAALIGLAADLPASVICDLFGLSVAAAVNWTRRAARDWTGYMHLVDERVRPSVSTVRRPNGR

SEQ ID NO: 4592 - protein, 905 aa, synthetic construct
  REGION 1..905: note = TnsF-Tn7 System Protein
MTHAYRAPEPWTPTAAEHQARGPRTPGEAVLSTPITKVTIPHLGEQVLPRGRLMSVFDEVVVDRPVTLVAAPAGFGKTSALVQWCCHTETTVGWLTVDEFDGDPRRFFRHVVAALQVAAHGDDRPDAGPLLDIAFRDPIGRWPEAASWPDHHDELLRALEALEAPLVLVVDDLHLLAGAESREIMARLIRLTPGELHLLLSSRSDPELPLHRLRLAGGLGEVRERDLAFSDHEIDRLAAMTGPSLSPEVVRSLSALTRGWPAAVRMALLTVEHEPDPVYRLAGMQGIDLSLTEYLTEEVLGSLRPALARFILRATIGDRIDAGLADTLHGGPGGAELLAEAARRGVFLAPQTDTDGEPSYRWHPVFASQCRAIMRKESPEIVRELHRAAANHWRARDAVEAVTAALAAGDADLAADVLTERWPELLVRSDSSALASLCHKIPASLSEDAEILQLRAVGELLDGRPTDGTMGRARARAGQLPPGRRHRFALIDVLVSNFLAPGRPGPDEAVRRGSAALRDVADAPVARALGHLLVGEAAAQLQGDPSTSVGHLHEGATLAVQHQLPAIAFACRASMSAPLFMSGQFDEADSLARDSIGRARRTGQHWASIVVPAYLTSGLADFWRDELVSAQRSLDQVVRLATPRQAGYRLHAVTVLALIAVANQDAASLARAHALATQNCETASPYLAGFVRMVDAIEADARGNEERAVAEVRTLDSSEQHPIANLWGAELHRRSGDAAGAWAALARIAPEQRVGHVDVAATLTEALLEHDRGNAGEAQRRLELALEAAGSFSIRRPFVERGPDLRGLLDDHHARGNRHVGLVADLIDRMQQPGDGHRKRSYWELTDREHTVLSYLRSPMTTTEIAEALFVSSNTVKTHLRAIYRKLGAGGRRDAIRIATERHAL

SEQ ID NO: 4593 - protein, 905 aa, synthetic construct; identical to SEQ ID NO: 4592
  REGION 1..905: note = TnsF-Tn7 System Protein

SEQ ID NO: 4594 - protein, 361 aa, synthetic construct
  REGION 1..361: note = TnsF-Tn7 System Protein
MLVDGLGLLQPESAVLDAMLEGWARQQRVRFLKASTIGHRLRMVRRMVEFSNLYPWQWTAAEVEAFISGQSGARQVSTARSYTGNLRMFLEYVTDPRYGWVAVCLERFGEAPQQVLDEWNSVVHSSEYEGSPGRRPLTYDEVQLLFDAADDNVDMVRRRRRKGSLAAQRDAAILKAVYAFGLRRREAWGLDLHDLRRNPKVPAFGRFGALYVRWGKARRGGAAQRRTVMLVPEMDWVVPILDQWIEDVRPRFDPGKHPAVWVTERRSRLDWRGINTAFARARDAAGLDPALDLHSLRHSYVTHLVEFDYPERFVQEQVGHAYAATTAIYTGVSDAYRNTLLRRAITSHQPDLWHDPEEEGP

SEQ ID NO: 4595 - protein, 109 aa, synthetic construct
  REGION 1..109: note = TnsF-Tn7 System Protein
MIKKMAVEWDLRLRMAERGLFATTDLVPLLAERGVHLSREQVYRLVTSTPQRLSTDTLAALCDILQCTPNDLLRVIVVDQQVAKRTSAGGPAGPAPDVQRTRIRRPDHA

SEQ ID NO: 4596 - protein, 419 aa, synthetic construct
  REGION 1..419: note = TnsF-Tn7 System Protein
MNWPDGRICGYCYQQAKRTRGICACGHEGVLPGRINNAPACRRCSGVRLNVDCRSCGAEDELYTGTHCWSCVLATTVDRLLTHPDTGIMHPALAPVAAALKSMKRANSGLTWINQPHVATFLSELAVAPAITHASLDQLPSSRTRDYVRGLLVEHGALPRRDELAARYRDWATQALTRVTDDHHRDVVQRYVRWHHQRRMNSMDTVTHGTFLRAKQAVTVAIEFLNWLHDRGIKLEQLEQAHLDSWQVEGPTTREIASRFLRWAITTRLVDPALTMTPHRRGTSPKLSASEQHTALRRIVNPDQLNPRDCAAAILVLVFAQQIEDVIRLTWDDVTVTDELVTVRLSDLTIALPPPLDQPWRQLAEQPSHDLTAAHPHSNWVFRGFSPGQPISADSLRNRLRGCSAPGRHDWAPCTNSPN

SEQ ID NO: 4597 - protein, 419 aa, synthetic construct; identical to SEQ ID NO: 4596
  REGION 1..419: note = TnsF-Tn7 System Protein

SEQ ID NO: 4598 - protein, 374 aa, synthetic construct
  REGION 1..374: note = TnsF-Tn7 System Protein
MDAVPGFVPRVLRDQGVGLFRAEERVFEAMVDGWRTQMLARGLVTATIETRCRVVTRFQRFTGEYPWTWRPVDVEDFLAERRCGPRPITLTTLRADSNAVAMFCAYLTHPSYGWPDFCQRMFGDVPAQICFDWNTPRHTTDDAVPPSRRAFSKPELQRLFDYLDDLIDREYAAGSKRWLPSLRDSIAFKVCYAYGLRRREVTMLDLQDFGPNPHVPAYGGFGAVTIRWAKGTTGSGPRRRTVLTVPEFDWVVDLLTFWAGPQGRVRLTSAERSSALWPSERADRITMGSLGDAFAQVRSAVGLPKELGLHCLRHSYVTHLIEAGYDPAFVQTQAGHSYASTTGLYTSVSADFKQKTVQQMIARRIAQKEGTPDA

SEQ ID NO: 4599 - protein, 306 aa, synthetic construct
  REGION 1..306: note = TnsF-Tn7 System Protein
MSWTQRQKHIGPISKRFSEYAQFFTRLNETVEDSINDALIKEKFTAEELRRYGYLTKFLAEEGYLTTSSLLREEWSEERRIEATLEKCADKSWGDQIGKFYLWLQKKNEKQLANRTIRLYIHAACSLMEHANVTCVENLRLQHLNAYLRKCPGQRASLHAFVSFVQVKFKVPLKLTGSRKKPVDKLYALDIAELLEMSSTDLPFKEFQAVLVKLLSILFGVPLKQVLSIGKNDLSLLPHSQKIRLNENWLDLDSRLLPIISKFLLMKVSLSNNEMRLFPGRGAIDFLSISSLNYRLSKARKSILKT

SEQ ID NO: 4600 - protein, 234 aa, synthetic construct
  REGION 1..234: note = TnsF-Tn7 System Protein
MKITLIKTTESKNGVRDVISNRRVCTGYEKIPNGDFVPYEGTLERDFLVLASFAARTKKVTAQPLKIQYKDGNGEIRHYTPDFLVEFNKVGNRRAWTPCLYEIKYREELEERWEQLRPKFQAAAQLCKERNWRFRIATDDFIRTDYLKNVYFLKRYVEWSDSENMSIVLLETMDALKISTPSELLAAAFWNKDRRMAAVGVFWHLIYAKKIGADITNPLTMETQVWAIEEDEND

SEQ ID NO: 4601 - protein, 646 aa, synthetic construct
  REGION 1..646: note = TnsF-Tn7 System Protein
MTNLASGGFFKVEAGALFSYRGRPVRIRRVLSLDSVVVQSLDTDETERVATEELRPITEVMPRELQKPITNDLEDYSDKDWAKAKEIYDVIEPLLIANRTRAQVEQAAIRAKVHPATVYEWIKLYSSSGHMSSLVPMTPGRKKGIKLIDPDAELIIEQVIEDIYLDSQRLNAAEIIEAVREKCRDQKIKMPHPNTIRNRLASLPQEKVLRAQGFVEDANKISKAILGSFPGADGPLSVVQIDHTPLDFIVVDEETREPLKRPWLTLAVDVYSRMIVGIYISLDAPSYVAVGCCLSMAMLPKKDYLASLGISGRWPVYGKMQKVHCDNGKDFKGKNLTRACDQYSISLQLRPVKTPRYGGHIERMIGNVNRVVHKLPGTTFAKPADRKGYDSKKKAALTLKEIETHIVEWIVNQYHQKIHSALNMSPIRKWELAILGDDKHLGHGLPLIPPDPQKLVIDFLPITMRTVQNYGIQIGTVTYYSEVLNRWINALSPDDPKKKRLFICRTDPRHLSKIWFFDPEANQYFEIPYRNLSNPDISRAEYTEISRKLKQEGRENIDEDVIFESIKRNRERTEHAITQTISVKRGRQTNSKKTKERKEAYTVTLNKTESKNVDESQTKKRPEPRDELDDLFDAPVAPIRNVRISS

SEQ ID NO: 4602 - protein, 668 aa, synthetic construct
  REGION 1..668: note = TnsF-Tn7 System Protein
MKNQHYSEAFLKNRAELLPDDVWGQFVVPHFIGSSPVLKEKKAVKIEGGRGCGKTMLMRYLCHSTTFSRKRKLIPDSALEFIGLYWKPDIRFCKLLKSAWLGDEADVAFAHYFTISVLEALCDCVESMAMADFESGILDLRKVALPNTLRSYFPKDILTFDLLRNHIKSERSALDLWVQNPKLERPLMFGFKDVLNNILEVFLNADKRLKDSFYRIFVDEFENLQPSQQRIINDYIKQPQTLFCVSFSVRSHAISEFFTSTDEQLIDPHDYRTINIEEQLLKGGRKNFELLAAEVVLLRLSNEGFDIQFPNFKREFLFDPRFLPERNEDLYKSAVLNRVKEIFPQTSVSEIASHACNDPALKNRLEKTIKLALKQRGIHDITTDIFFDKVHPTVSIVAASVLHRGKLKTSYILEQLELSISSPERSEFTKRDGGWVENTLHGSILYLYKGLPNRENLLYSGFGRYCGMTRPNLRYFQELCHQAFLESELRKDSLVPMVVSPEIQAFAAKQVSTKLLNEVERAGANGKNLHKLIMRLGHLFEAAQRRPSQGESEVNHFSIDDAGSIGLKNEVSLLLKDALMWSVLYRTDDTKNKVDYDIVQNDYVPNPIYAPYFGISYRKKRKLALTAVEINTIFLGTGMEYQNLLRSYTEKWEINSENDSRKNYDLFT

SEQ ID NO: 4603 - protein, 668 aa, synthetic construct; identical to SEQ ID NO: 4602
  REGION 1..668: note = TnsF-Tn7 System Protein

SEQ ID NO: 4604 - protein, 293 aa, synthetic construct
  REGION 1..293: note = TnsF-Tn7 System Protein
MSLNHHLSPAILDYVDRAKVERITFIRRDHFLSYDMGDAHLRELEDLINHPKTNRMPCRALIGDSQSGKTTLLKEFIIRHPIYMDSANKEICHVISVEMPPEPDEGRFWSAVLQSMLIVHNPAGIVEKLEAQAMSELFDLGVKMIIVDEFHNMLHGTARLQRQFLAALKSMVNRLGVVLVVAGTSDVARALASDSQFLTRFEQMALPRWKLNQQFRNLLATFESILPLAEPSDLASREKTIAIFNASGGAIGGVKKIITQAAVNAIESNLESISYTILTDAIQSLNERSMSKA

SEQ ID NO: 4605 - protein, 293 aa, synthetic construct; identical to SEQ ID NO: 4604
  REGION 1..293: note = TnsF-Tn7 System Protein

SEQ ID NO: 4606 - protein, 608 aa, synthetic construct
  REGION 1..608: note = TnsF-Tn7 System Protein
MDENEASVESDVLFQKFPSGGGLYRIHYAGSYIHPKSEHHTPRVGIWLSEVNLNSHGEFITKSISKNGSVFPELTFLVESAGSIPSLAIGTYWQDGHRVKIGGVPEDISESFEIGAHELWDMVVATDTISSQREMWIPTHSYQFCGIDVSDAFHNFAKAPMVRVTAKCGTQLLIPPYEIFRAYFCPCSELARELLSHRFDDAVAALAKHYKLPNLDSNIFEIELNKNIPEIAARYLALFLGTDVGTMRATSVRIDVVNQWRSDPMGTHWIKALPPFPDHDIQIKLAGKWITKRGENSHRKSSREDRFFAFRITDSTFPSLPYQINHVSETKYIPTYTNEQPNAETGSTQEKEAKHRSVTQLIGDEDAEIGAAILHLPSLSVNWLRDSLPEINRVYRKIQEYPGGVRAQQSSPERNRASTGSKGAKGTFPQASLSSQDSEQVIERFMALELCLNTLKKNNIISDWQEHAIVRPINKLGRNYCALVDKDATIYYKWSLVYDPFIRSRLVWLIQLERKGHLIYLLDIEPRSKSDTYAILVFVPASKTLELKVIERLFNHCITKEGRFSNYSSSGFQGDLLWTKAFHKFEENQLDPEKLLGAIDEVIELSTS

SEQ ID NO: 4607 - protein, 426 aa, synthetic construct
  REGION 1..426: note = TnsF-Tn7 System Protein
MEKNENPGHICPVCGTEDCVRMHEPTRWEQPGGRHQSKGKCPVCSTYQVLRFYNKDGALACRNCAGMAQVGRLDICCICNEKKEIRFRRVDGGLVCTKCYHTALEQCVLCGKVKPVHCRTPDGPICQNCYHPPEEECIRCREIKPVVQRTPDGPICENCYQPPEEECIRCHKVKPVHQRTPDGPICENCYQPPKKECVRCHEIKPVVQYTSDGPICQKCYQPPEEECIRCGKTKIVKQRTPDGPICRNCYRETYQPPEEECIRCREIKPVEQRTADGPVCRSCYYKTYQPPEEECVRCGKTKPVAQRTADGPVCNGCYRETYQPPEEECINCNKVKPVKKRTPDGPICENCYQTPEEECVRCGKTRPVLQRTSDGPVCKNCYRTPEEKCVLCNKVKPVKKRTPDGPICGACYIRERRKRKKAKAKK

SEQ ID NO: 4608 - protein, 86 aa, synthetic construct
  REGION 1..86: note = TnsF-Tn7 System Protein
MYYFYVLKSKRDNDLYRGFTNNLKRRLDEHNTGLSKSTKGRRPFKLVYYEAFASKNDAKRREKQMKLNGKAWGQLKRRIQNSIEEA

SEQ ID NO: 4609 - protein, 485 aa, synthetic construct
  REGION 1..485: note = TnsF-Tn7 System Protein
MSRPVSCGACARCDRAGVKFATMWPEGRICRRCYQQATRLRGICPGCAEHRLLPGLLDGAPACTDCTGIAHDFRCPRCGREDEAVRDGICAHCCLAEELTDLFDDGTGAIAAPLQPLFDALIGQRHARSARTWLAVNRHAAQLLGEIAQGRKRLAHETFQNHPYPAKVAFLRALCIEYQLLEPVNLDIERFQSWIEAKTGALAAQDARLINQYARWVHLHRMRHLENTGKLKTGTFLAARQSTTMAIGFLQHLRTRGRSPQECTQHDVDDWLAGGPTTRSLARGFIRWAAQHGHLPAVDFPYRTAHSSPVISQAQRLGHIETLTDPLAENLGAARIAALFLLLYGQPLTRISCMDLEQIHDSEGRLTVSFTDDRLVIPSPFDTVVRAHLTALPNMNTAAHRQNSWLFPGARPGQHLHQGTIMNRLRDRWIDLRGARNASLRALVLEMPAPVVADAFNYSHSVTNRHRRDAGALFTDYIKNRSADP

SEQ ID NO: 4610 - protein, 485 aa, synthetic construct; identical to SEQ ID NO: 4609
  REGION 1..485: note = TnsF-Tn7 System Protein

SEQ ID NO: 4611 - protein, 377 aa, synthetic construct
  REGION 1..377: note = TnsF-Tn7 System Protein
MGMHRWEPDGAVPETLRTGARVLNEAETVWIAMLQGWAAQQSARNLSATTIETRRATVVRFRQFADCYPWQWTAGTVDEFFLELRALKGAARSTVLGYQNALRMFLEYLTDPAYGWGELCWDRFSDHPAQVFHEWNTARHAQDAVGSPGKRPYTRDELEDPFDCADERVLRIRRAGSKGWIPAFRTATIMKVAYAWGLRRNEVRNLDLVDFAANPLAPQFGEAGIVYVRHGKAMRGSPPKRRSVLTVPEFGWAVDCVQQWIDEVRPLYAPPGSTQLWPSERGTAVIAADSLSRGFNEVKRAAGLEEALDFHSLRRSYVTHMVELGYDAFFIQQQVGHAHASTTSIYTGHSPDYRARVVNDAIERTIQAALNRKDTEN

SEQ ID NO: 4612 - protein, 110 aa, synthetic construct
  REGION 1..110: note = TnsF-Tn7 System Protein
MKRHVEYTWRLRELMAARGMYNISDIIPHLEDRGVSLSSSQIYRLIGDTPERMNLALLGALLDALDCTFEQLCPMTVVAVPTRDCLSGTEAGAVNKGAIRPTRARIHRPE

SEQ ID NO: 4613 - protein, 479 aa, synthetic construct
  REGION 1..479: note = TnsF-Tn7 System Protein
MSPPPAACARCDRTGVKFATTWPEGRICRRCYQRATRIHGTCPACSQPRLLPGLIDAEPTCTDCAGIPKDFHCTRCGREDEPVRTGLCAHCCLADDLALLLDDGTGSIAAPLRPLFAALTTQKHARSARAWLTVNRHAEQLLRDIAQRRAPLAHETFRDHPVPQKVAFLRELCLEHGLLGRVNLDIERFQDWLESKAEALPAADARLIRQYARWVHLNRMRHLERRGELKKGTFLAAKQSTTMAIGFLNHLVTRGTMPRDCSQADVDDWLATGPTTRSIARTFVRWAVEHGHIPSVEFPYRTAQTTPVIGQQQRLDHIRALTDPTAPITAADRTIALFLLLYAQPLTRISRMTLDQVEAIEDTILVSFSGDRLEIPPPFDGVVRAHLDALPNANTSSHRGQAWLFPGAQPGQHMHQTSIMDRLRELGIDLLGARNAALRALVLEMPAPVVAGAFDYSYTVTDRHRRDAGATFTDYVTHR

SEQ ID NO: 4614 - protein, 479 aa, synthetic construct; identical to SEQ ID NO: 4613
  REGION 1..479: note = TnsF-Tn7 System Protein

SEQ ID NO: 4615 - protein, 378 aa, synthetic construct
  REGION 1..378: note = TnsF-Tn7 System Protein
MRTTESVPAGAVPLVLRSGAGLLNEAETVWTEMLQGWAAQQFARNLSAGTVEARRGTVVRFREFAGAYPWEWTAGTVDEFFLELRALKGAARSTVLGYQNALRMFLEYLTDPAYGWCRQCWERFGDHPAQVFHEWNTARHAQDALGSPGKRPYTRDELEDLFDCADERVLRIRRSGAKGWIPAFRTATIMKVAYAWGLRRNEVRRLDLVDFAPNPQARQFGNAGIVYVRHGKAMRGSPPKRRSVLTLPEFDWAVECVRQWTEEVRPLYAPPRSTGMWPSERGNAAIAADSLSRAFNEVKRAAGLDEDLDFHSLRRSYVTHLVEIGYDAFFIQQQVGHEHASTTSIYTGLSPDYRARVVNGAISRMAGEAMAANKEPAL

SEQ ID NO: 4616 - protein, 110 aa, synthetic construct
  REGION 1..110: note = TnsF-Tn7 System Protein
MKRHVEYAWRLRELMAAREMNNISDLIPHLEDRGVALSASQIYRLIGGKPERMNLALLGALLDALDCTFEELCPTTVVAVPARERLTGTEASTAKKDAVRPVRARIHRPE

SEQ ID NO: 4617 - protein, 487 aa, synthetic construct
  REGION 1..487: note = TnsF-Tn7 System Protein
MARPRRQSDPNQWPVPCCRCGEHHQIAAKWPDGGVCGYCYQQAKRTTGICACGHEGVLPGRIDGQPACKRCSGVKLNIECKTCGAEGELYRAGRCWSCELAAVVDQLLTNPDTGVMADELVPVAAALKSMKRPNSGLTWIRQRHVTDLLKELAVSQTITHELLDDLPGADRTRNYVRGLLVEHGVLPRRDELAARYDDWATGALERVTTVEHQTVLRRYIHWHHRRRMNEMETVPRGTFLRAKQIVTMAAEFLNWLDSCGVTLKDLRQEHLDAWLADGPSTRRIIDRFLPWAIKGRLVDPELIIKAHRRGTSPKLSKSEQDSAVERVVHTDELNIRDRAAAILVIVFGQHIEDVVQLTWDNVTVTDDVVTLRLGKTTFALPSPLDEPLRQLAATPGNGLTAAHPNSNWVFPGYSPGQHIHGASLRNRLKTIFGTRSARLGTLHELTKLGPIPIIADALGYHPATIERHAIGSASVYSQYIAARRQLG

SEQ ID NO: 4618 - protein, 487 aa, synthetic construct; identical to SEQ ID NO: 4617
  REGION 1..487: note = TnsF-Tn7 System Protein

SEQ ID NO: 4619 - protein, 375 aa, synthetic construct
  REGION 1..375: note = TnsF-Tn7 System Protein
MQGVPGFVPRVLRDPDVGLFRAEDRVFEAMLDGWKAQMLARGLTVQTIEGRCRVVQKFQEYAGTFPWTWRPVDLDDYMAERRSGEKPISLTTLRSDSNAIAMFCAYTASPTYGWGELCEQTFGDVPAQIAFDWNTPRHTTDDAVPPGRRAFKKKELQQLFDHMDDLVDREYAAGSKRWLQALRDSIAFKVCYAYGLRRREVTMLDVHDFGPNPYVPEYGEFGAVTIRWAKGTAGSGPRRRTVLTVPEFEWVVDLLKFWIHEGGRDQFPTADRSPALWPSERADRIRLGSLGDSFAAARAAVGLPKELGLHCLRHSYITHLIEAGYDPAFVQTQAGHAYASVTSVYTSVGDDFKQKTIQKLIARRIARPEETNPDD

SEQ ID NO: 4620 - protein, 472 aa, synthetic construct
  REGION 1..472: note = TnsF-Tn7 System Protein
MVARAEDGTSRCHRCWVANHLEPCSGCDRTSRPVARHDDGTVLCGTCHRNSKPEVACTGCGRVGHHEVGGASGPPRCTRCWALEQLECARCGTTTTAELRWPEGPICSPCVNLALASPQPCASCHTVQPNVAAAGDPPQCPPCADLRFHYQCASCGLFTRQLRADRCATCNLINARQPDRAPTLNAFEQRVDELLTTVPEPARLVVRRYVRWAVTRPLQRKVSEGAAVRSELLHWPLDRVRTAALFAANVGGLADVTQTQLDAWVTELPSHRSALRSFVRWAVSHDYMAAELDVPASTSREQRATLDDEERLALAERLLRHKLDDPPARLAAVLVLLFGQRITRLAALDVDAVIVTDGRTTLTLASTPIRLREPLAGLAREVAGTSRRTGSRWLFPSSQGNRPLTGERLRDRAAKLGLHNALHARNGALAALAAQMPPALLAEQIGLSVGAAAKWSKATGATRSTYVGLRVQ

SEQ ID NO: 4621 - protein, 549 aa, synthetic construct
  REGION 1..549: note = TnsF-Tn7 System Protein
MLKQLSLFDPAFCQRWRGGNHTWRPVHEGGFDQRRYRLEPVPEAAARRFVAEHHYSKSFPAARMSFGLLEGDHLVGAVVLGVPMHPAVLTKPFPTLGPGRAAEISRLVLLDEVPSNAESRRCCIARNNSALRCRSGSHGIASRSRRSVAVDHLLRVASDATTMRSMARGASPLTVARAQRASAPNVGAAAFMDTSVVHMDLPQAVFDAMLEGFDRQQAARGLATDTRRGRERLVRQLRAASGAWPWEWTPAHFDAWTAAHLRAGRTKATMRGYQNAIVAFSGFVADPRYEWGMVCQEVFDATPARVTHELNLIRHKGDYEGRPDANRPLTRAELDKFFGTVDARARNAAAFHRKGAASAHRDATMFLIMLGWGTRRTETAGLDVSDFRRNAKSPQFTRYGALVVRNAKSFPGGPPRRRTVLTAFPWAAEAAQHWVEAGRGACYPEVDGRVLLPTERRARITPRQINLRFAAIRDAAGLPDYLNPHCLRHTYATTLIEMGWPMALVQEQLGHTHVATTAVYTALSDDFKDRVLYQSLGLEWDDSEQGATL

SEQ ID NO: 4622 - protein, 114 aa, synthetic construct
  REGION 1..114: note = TnsF-Tn7 System Protein
MTGGPAFEWKLRELMAVRGMFSTSDLIEPLADHGITLSRSQVYRLVAETPERVTIPLLLALCDILGCQLTDLAAAPDPAKAARPATRAARKKAVGETPLPPSAVPPSFFGRSGP

SEQ ID NO: 4623 - protein, 764 aa, synthetic construct
  REGION 1..764: note = TnsF-Tn7 System Protein
MEPTAATADPRSAARGVLADPVGFIVDMVAALESGLDRETILSVVAGVAGGRPKARRLARALSQRPELLTDGRSPAPRALGDLLISLGEAGAVRISAPVCTECRKPLKALQRKGENWYCGGCGPTPEPCTGCGNLRLVASRTRDGGARCMGCPIRNEPDPVGVVVQVVAAIDPGIGAETVRSAILAAAPQPGQRRRLAWALEDHPGLLTGDGAQAPVPTVLRLIELLCQSGAERIVRPPCPHCGRLLALIQPRNGLRLCRNCVAKSRRQPCAQCPAIAEPASRNEQGQPLCSHCSSNPADHETCHRCGRRRQVSTRTADGPVCKSCHPHKILTCSVCQATGPARISQTTGKPRCLACSASRDGGAVQRRLQEVLGDGHGNIRPGLHNLYQELAATERIVTVTSWLNKSGAPTILGTLDSRTPLTHQVLDDLAGETTLAGDKTTEHLRALLVATKTLPVRDEQIARLERWITHRLAEQSDPAQRQLIHRYAIWHQLRRLRGRLRGADATYGQIRVIEQNTKGATRFLHWLTGRGLTLETAGQGDLEAWYISKDATLRAPTGNFIRWANAHKLTSLHFRAEQWGGPTTPLDTEERWADARRLLHDTTLKPEDRVAGLLVILYAQRPSSISRMGLDDVHIETEQVLLHLGPEPILLPEPLGILIRQVIADRQNHTMIGTREASPWLFPGGRPGQAITPAHLGVRLKKIGIQPGQARSTALFQLAIDLPAALMARMLGIHVGVAVQWQRASSGDWASYAADVSRRNQP

SEQ ID NO: 4624 - protein, 764 aa, synthetic construct; identical to SEQ ID NO: 4623
  REGION 1..764: note = TnsF-Tn7 System Protein

SEQ ID NO: 4625 - protein, 244 aa, synthetic construct
  REGION 1..244: note = TnsF-Tn7 System Protein
MIEVTNVTKTHGQITSADQVSFIAEAGVVTGLLGPNGAGKSSVMRIICDLDRADAGQATVCGRRYREHPIPMRVAGAQFEGSGAHPSRRAIDHLRWIARTNRLSDARVIEVLELVDLQPRDWKRRVREYSLGMQQRLGIASALLGDPQVVIFDEPANGLDPLGIQWLRGLLTGLARDGKTVLLSSHLMSETEMIADRVVLMDRSRVIGEGDVKDLVHAHGSLEKAFFERLELSRQQGSDTGDAR

SEQ ID NO: 4626 - protein, 244 aa, synthetic construct; identical to SEQ ID NO: 4625
  REGION 1..244: note = TnsF-Tn7 System Protein

SEQ ID NO: 4627 - protein, 381 aa, synthetic construct
  REGION 1..381: note = TnsF-Tn7 System Protein
MHILVLVVRVARGDLAGSAHLELVSGVAQLRPEDAMVDAMLSGWRAQQSARGLQERTMASRESQVRRFADFTNEYPWHWTPADVDEWSQWLTSERHLAPSSIRGQQAHLRLFSEYITDTRYGWAQTCEEAFGTFPVPITHEWNTIAHLNEYEGTPEARPFTRQEVQRFLDYADDQVDRAVRSKRKGALAAYRDATLFKVIYGWGLRRTETAKLDLNDWGRNPAAAEFGRYGMLHVRYGKSVRGQTPRRRNVPSIMGWAVEAVTDYVENIRPRFGGAEHPALWLTERGGRIKPVEINARFVAYREALELPSELTPHSLRHSYVTHLTEDGVDRRFIQEAVGHRSDSSTAIYTHVSSDFMNTALRKALTPAFDPAPPEPPKEP

SEQ ID NO: 4628 - protein, 109 aa, synthetic construct
  REGION 1..109: note = TnsF-Tn7 System Protein
MTRQLDYRWHLRQLMAGRSLFATTDLVPLLADRGIKLSSSQVYRLVAERPERLSLKTLVALLDILECSMEELIEPVAAEPALKAKVAGSGTNAVGDLRPKRARITGPGT

SEQ ID NO: 4629 - protein, 466 aa, synthetic construct
  REGION 1..466: note = TnsF-Tn7 System Protein
MTEQICQLCDRTAMKGRGLCWSCGKGIGRDRGNCARCGKPNRLLDHDDCCRWCRELARKRCQDCGPCDVPLVGVDGSRVCNACALRRDLDRVLAGDGVLAPLRESILAAEPLTTRRWLARTRELLQDLDTGRIPLSHDTLDQFPQRRAAEHLRALLVATRLLAPDPHRSLRRLETRVPDLLTSLDLEHRRITTRWVNWKVLPRVRAQHEQRRVDTSARNATRQIEQVVAFLTTLQEAGRHLGETTQHDIDSWFAGHGAIRHVVRPFLSWARQSRQLPQQVELPRAYVGQPVAPMDSEQRWQIARRLVTEDSLDPADRIAAALIVLYAQPLNRVVALTIDDVTITQTGTSLTLGTDALELPEPFATVIRSLPVRRRHGTAENLPTRWLFPGSHAGKHITANALASRLRRSLGIRPRQLRLAASEQLTREIPPAMLSGVLGLHPQTIVRLSAKASGSWANYAADPLST

SEQ ID NO: 4630 - protein, 466 aa, synthetic construct; identical to SEQ ID NO: 4629
  REGION 1..466: note = TnsF-Tn7 System Protein

SEQ ID NO: 4631 - protein, 483 aa, synthetic construct
  REGION 1..483: note = TnsF-Tn7 System Protein
MPARWEVSDKIALLRQHDNGVPWTRLAAESGVSLRTLSRWARAYRADSTSHGLARRQRSDHGRRRIPTELIEIVEALALAKPAPTVAFVHRRVAGIAHDRGLSAPSYSSVRSLVTGIDPGLRALAEHGDAGYRDRFELVLRRSAERPNEQWQVDHTLLDVAILGAKGTQVRPWLTVVLDDYSRAVAGYTLFLGAPSAEQTALALHQAVNAKTNPGWPVCGLPEVLYSDHGSDFTSARLEQVCLDTHIRLIHSRVGVPQGRGKIERFYRTVTTELLPHLPGYIPHGTNGAPVTTPALTLEDLDVIVEQYVVAEYNTRPHSQTHQGPNDRWSASGFIPRSPAHPEDLDLLLLTAATTRKVQRDGIQFASTRYLSTVLAAYVGEQVTVRFNPRDVGEIRVYFNDEFLCRAIAPELSAESISLDQLQAARRQRRRDLKHQLRQHRTLASALPGDTRYTPPAGSTDDTAPPPAPEPRPRHGLRLYATD

SEQ ID NO: 4632 - protein, 300 aa, synthetic construct
  REGION 1..300: note = TnsF-Tn7 System Protein
MPPTNKLSVLGKDDDGRRFLTGTFDEVNSPAPHPHPAPAFHSTREHRRFTEFADTVRTHRYIGLCWGPPGIGKTLSARHYAGVDDWEQWQSVVADAVGPVPPRVLEARTAFYTPTVAATVKQIDQGLPRACQAISYAIDYAELGLVDPYLYDASRSSGRTELLIIDEADRLKSAGLEQVRDYYDRHHMGVILIGMPGIEKRLARYPQLYSRIGFAHEYRPLGPDELTAVLSARLPAQHNTDHDPIAHAAALATIARITAGNFRLLDRLITQIERVQTINDLYTLSPELVDAAREALLIGH

SEQ ID NO: 4633 - protein, 300 aa, synthetic construct; identical to SEQ ID NO: 4632
  REGION 1..300: note = TnsF-Tn7 System Protein

SEQ ID NO: 4634 - protein, 335 aa, synthetic construct
  REGION 1..335: note = TnsF-Tn7 System Protein
MSHANAPLTPAGRLRLIQRCQIRPIAHVAAEAGISRACLSKWKARYDADGEDGLIDRSSAPFARPTQLAPAVVDLIETWRREHKWTARQIARELNGRGHRCSVATVGRWLRRLGINRRKDLDPEGHSNRVVGTITARFAGHMVHLDVKKVGRIPDGGGWRAHGHGSAQHKKSRAAKKAGARAGYVYLHSIIDGYSRLAYTEALPNETATTTIGFFHRARAFFAAHGITRIVRVITDNGSNYRAADFTRTVLAHASRHQRTRPYTPRHNGKVERYQRILAEELLYAHAWNSEAERTAAISAWNIHYNYHRAHTAAGDRPPASRLRTGVTNVMSQNI

SEQ ID NO: 4635 - protein, 377 aa, synthetic construct
  REGION 1..377: note = TnsF-Tn7 System Protein
MRDVDGSAEGRSQRAPGDPAARLLMPGVALFAAEETVLTAMLEGWELQQRSRMLSGLTIERRLLTVRRFVSFTNDYPWRWTPGDVEAWTAEMVSAGLAHSTVRNYQMAVALFCGYLSDARYQWHEVCERHFGDVPVQIFHEWNTVIHRTDYEGRPGNRPLSRDELQAFFDYCDQRVGQVRARGRKGWLATFRDAALFKTIYAWGLRRREAAKLEIVDWSANAAAPEFGRYGALAVRYGKAMRGSPPRRRTVLTTMGWAAEALAEWVEEVRPLYDATGTALWPTERRAVVGTDAISRRFSEYRDAIGLDRNLGPHCLRHSFATHLLEDGFDHLFVQQQLGHSWGSTTAIYTSVGADYKNRALRQALDRAFHPETLNRD

SEQ ID NO: 4636 - protein, 116 aa, synthetic construct
  REGION 1..116: note = TnsF-Tn7 System Protein
MARTPQRRLGYRWHLRRLMAEQEMFATTMLVPLLAERGVQLSEAQVYRLVTGTPERLSLRTLTALCDILSCTPNDLIEPVAETAAAKATGTGGKPARVSAKVTARTPRRAEVSHAK

SEQ ID NO: 4637 - protein, 506 aa, synthetic construct
  REGION 1..506: note = TnsF-Tn7 System Protein
MTIEQPAGLTPRSTTRGRPRTTGAVTCARCHRAAGKARTQWPEGPICGTCFYRATRTRGTCPTCGEDRLLPGPPTDGGAPTCGPCAGIAQDFHCTRCGHEGEFYRRGGLCARCALREDLTAELVTPAAEPDLMRRLVDALCASERPESIFTWKRSTKVHALLRSLATGQTPMTHEGLDTQGHGHHVEHLRALLVHHRLLPHRDPYLARFETWIRDKLAPLPRHVAQPVEQFATWHHLNRIRDKAAAGAATRGPVHAAKQQITETIKFLTWLDTTHQRTAATCTQQDVDAYLAPGPTTRHLIRTFFVFAKKTRINTRIEIGHRKARTSPSLTQDQRLAWLAELLTGTSESLPYRAAGILLLLYAQPLVRVAALRASDLSARDNQLYVALGKHATPVPAPFADLLRDHLNNRPNLNTAAGPDSPWLFPSTRAGGHLHPDTLMHRLRDLGVNLLGARNRALADLVTEVPPPVVADALGYSHQVAFKHAQEAAESWARYAGRRAPSYEPQ

SEQ ID NO: 4638 - protein, 506 aa, synthetic construct; identical to SEQ ID NO: 4637
  REGION 1..506: note = TnsF-Tn7 System Protein

SEQ ID NO: 4639 - protein, 366 aa, synthetic construct
  REGION 1..366: note = TnsF-Tn7 System Protein
MAVDEAGRVRLVGSVPLLHPEQQTVEEMLDGWRNQQLSRNLQFGTIDQRIRYVRRFIDHVNEFPWKWTPAMVEEYFADLRSVRRLSHSTLRGQQSALRHFTSYIANPDYGWDRVCEQLFGTHPAQVFFEWNTAPHVQEYEGRPSKRPYTRQELQRLFDHADDEVARIAASGRKGWQPAYRDSVMLKVAYSYGLRFNELRHLQTVDFATNPHARRFGRYGVCKVRYGKSRRASPHKPRSVLTVFSWTPGILEDWLANGRGALETNDLFPSERGGLVSESTLIRRLRRYCEELDLPDGLDLHSLRRSYATHLLEDGWDPMFVQHQMGHEHASTTGIYQFVSSDFRNATLKAALERTVGEAVGTPGGSS

SEQ ID NO: 4640 - protein, 270 aa, synthetic construct
  REGION 1..270: note = TnsF-Tn7 System Protein
MTTTTTPEKTVPALGVPSAPPLPEDLEALLRRLRLPHIRRHAPEVVATAKAQRWEPVEVLRALFTEEAAGRERAALATRRTAAGFPTGKTFEAWDPALSSIPVPTQQALRTLEWVTRKENLVLCGPSGTGKTFLLEALGHHAVEQGLKVSWFTLEDLGALLRRHRADDTVTKAIARVLRADLIIVDDIGLLPVATDAAEGLYRLVDAAYEKRAIAISSNLHPAAFDELMPKTIATATVDRLLHHAHVCQTTGESVRLSQALSGRGVSPLA

SEQ ID NO: 4641 - protein, 270 aa, synthetic construct; identical to SEQ ID NO: 4640
  REGION 1..270: note = TnsF-Tn7 System Protein

SEQ ID NO: 4642 - protein, 276 aa, synthetic construct
  REGION 1..276: note = TnsF-Tn7 System Protein
MTTTTTTEPMSPSQASLYQQLRGHLAALKLTAAAEHLPAVLDQATAEGLTVTAALERLLALEVEDTEARRLAGRLRFASLPSPATLESFDLDAAPGLDPALINELATCRYLETATNVLLVGPPGVGKTHLAVGLARKAAEAGYRTYFTTAADLAARCHKAAIEGRWAYTMRFFAGPTLLVIDELGYLPLPAEAASALFQVVSQRYLKTSIILTTNRGVASWGEVLGDTTVAAAMLDRLLHRSVVLNLDGDSYRLRAHHAATDTLRRATTGTARPLQ

SEQ ID NO: 4643 - protein, 276 aa, synthetic construct; identical to SEQ ID NO: 4642
  REGION 1..276: note = TnsF-Tn7 System Protein

SEQ ID NO: 4644 - protein, 112 aa, synthetic construct
  REGION 1..112: note = TnsF-Tn7 System Protein
MRRTVDYTWRLAELMAARGLHSTTDLIPLLAERGVELSRPQVYRLVNQRPERVSLQFIAAICDIFGCGPEDLITVTAADARKRKTGTSPAPNVVDLARAARPRRARVIDDDH

SEQ ID NO: 4645 - protein, 499 aa, synthetic construct
  REGION 1..499: note = TnsF-Tn7 System Protein
MTEPRRRGRPRTIGDIECSRCHHLVPKIRVHWPEGAICGPCFTTAARTYGLCSFCGTERLVPGQTATGAALCRNCAGITTNLDCDNCGREAERLRGGHCARCIVTTDLEQILAPHQPPDMRLKRLIVELAAVPRPESIITWMRQPATAELLNLIGTRQLPLSHDAFDAMPPSKALEHLREMLIAHRMMPDRGDRYLARFERWLDQRLQTLRDTPTIATPIEQFARWHHLRRLRDNNDPTRNMDNATRCAKQEITEAAKFLTWLLAEYDTTIDDLTQGQLDTYLSDGTTTRTAIRNFIQWRARAGIAPPFKTRYRVARTAPLASTRQHLDLIKHVIEADHVLLSTRIAALLLMLFGTPLDHICRLTIDDVVTTPTRTTIALGAVPAPIPPALLPLFHQHLEQRANSRTMNHRSPWLFPGYTAGQHISEQSLMHRLRSLGIDITAARNAALHDLAKEIDAASLADLLGYSTQVMNIHAARAAVPMATYPAINRPRSHLRTN

SEQ ID NO: 4646 - protein, 499 aa, synthetic construct; identical to SEQ ID NO: 4645
  REGION 1..499: note = TnsF-Tn7 System Protein

SEQ ID NO: 4647 - protein, 373 aa, synthetic construct
  REGION 1..373: note = TnsF-Tn7 System Protein
MDDAMGRLVYLPAGASGPDPEAFLEDVLTGWRRAQLAQGTSTETIRRRNAQVLRMADFVGAFPWQWTPADADDFFGHLRGVLNRAHSTVRAYQTDVKLFLDYATNPAYDWNEHCGRLFGTVFSQVITEFNRAKHVQVDDSRAVKRPFTLDELQQFFDLADLEPERILHAGRKGALAAWRDAVAFKTLYGWGLRRNEVRHLQLVDFSRNARAPFFGDWGLVRIRHGKAMRNSPPKQRTVLTVFDWAAEAVADWVERGLPRYGQPVTDLFPTEKGGLVPERNLWQRMRDLIDELGFPAGLDLHSFRRSYATNLQTAYGYDVSFVQLQLGHEHAATTSIYTLAAPDYRARELERVLSATLTRSKADLSESRRRESR

SEQ ID NO: 4648 - protein, 686 aa, synthetic construct
  REGION 1..686: note = TnsF-Tn7 System Protein
MTITPARRDRTGALSPGEVARAAVTAALCSAIAVTTVALPFAFGLTILGVVPMALLARRERMRVVVATVVAASILTFLGVGLGGPCVIAVCAYMGVLIGRLQRRGEGILTTLTAFAVSLAASTVFAVALTGLLTALADLRHLVLDAITVYTGGLASVMSAIPGLGTAGAAIAPFTETLIENWQIVVITASMLGTSAMAAIGWWTLKRLPDHETATVRLEPDNADEGAGPIAPTPLVMHAVRYRYPGADHDALGPLTATIDRGERVAVTGANGSGKTTLLRLLAGQKPTGGTIGRAGAVGLGRCGGTAIVMQHPESQVLGTRVADDVIWGLPADVDVDIDDILDQVGMAGFGDRDTTALSGGELQRLAIGAALARRPQLLVADEITSMVDQPGREELLRTLREVTERYDTALVHITHYDTEASAADRTITLPGARPRGEHPQEFSTLPNTPVTDAAPGDPSTRSVVLELRSVGYEYGLGTPWQSSALRDITFSVHQGDGLLIHGLNGSGKSTLAWIMAGLTEPTSGQCLLAGAPVADQVGKVALSFQAARLQAMGNTVATEIAETAGLDFDDQTRIGEAVGSVGLDASLLHRPIRHLSGGQIRRVVLAGLLARRPRVLILDEPLAGLDSTSTHELLRLLTRLRHDGLTIVVISHDFSGLEALCTRALHLRHGDLTTPMVNNQEGQPR

SEQ ID NO: 4649 - protein, 686 aa, synthetic construct; identical to SEQ ID NO: 4648
  REGION 1..686: note = TnsF-Tn7 System Protein

SEQ ID NO: 4650 - protein, 111 aa, synthetic construct
  REGION 1..111: note = TnsF-Tn7 System Protein
MRREIQYHWRVREFMARAGMKNSRDLVAPLRERGITLSESQIYRIVGQEPDRISFKVLVALCDIFGIEAGDLITYTATDTRQSRTKAVNAPSDVPLLNAYRPVKARIITDD

SEQ ID NO: 4651 - protein, 489 aa, synthetic construct
  REGION 1..489: note = TnsF-Tn7 System Protein
MARPKKPGDPAAWPNPCARCNQHYQLVARWPDGRICGYCYQAAKRERGTCRCGHTGVLPGRIDGHPACRSCSGVRLNIDCVSCGAEAELYRAGRCLHCELNLVVDNLLTDPGTGKIAPELVAISEAMKNMKRANSGLTWIKQGHVREFFEQLRGHSVVTHELLDTLPPSRTRDYVRGLLVEHGAIPRNDLYRDRFNEWTPRAIDRLDHSDDRDVITRFIRWHILRRMNEEGATSRGTFLRSKQTVTVAIDFLSWLRARGVLLENLGQSDLDEWQASGPTTRGIASRFLGWAIKSRLVHPDLRLTPHRRGTSPKLDAQAQTQAIDEHVHSARMPVRHRAIAILLLVFGQPLERLLALTWDDVTIADDLVTIRLGGTADIELPSPIDEPFRQLAAEPDNHQTAAHPDSNWVFPGYSPGRHLDPGYIAGRLRTTVGARAARLGTLHELTKLGPTAIIAEFLGYSPATIELHARGSAANYASYIKARLDDARG

SEQ ID NO: 4652 - protein, 501 aa, synthetic construct
  REGION 1..501: note = TnsF-Tn7 System Protein
MDPKPTGLSPRSTVRGRPRATSTREDPCARCGRNIPRLAANWPEGRLCNICYYDAVHTRGTCPECHQDRLLPGLRAADGQPICSTCAEIPVDFHCERCDVEAARHRGRLCVRCALRDDLHGLLGGVPSDPALLGLVDALCASDRPESILVWKRSAKVQKLLRGLGDGTIAASHEGLDSVPGKPAEHLRALMQHHSLLPHRDPYLPRFEQWIEGKLDGLPDEVRQPVQYFATWHHLRRIRAKVGAGAATRGPVHSAKQEITETVKFLVWLHETYQRTAATCTQQDVDEWLATGPTTHSAIRTFFVVARKARLNTTVTVQHRSAKSSPSLSQDQRLAWIHELLTGTSESLPYRVAAMLLLLYAQPLVKVVTFRTSIIDDGDSGMSITLGSHPTDVPEPFASLLREHLAARPNLRTGGGPDSPWLFPSTLAGRHLHPNTVMDRLRDLGVNLLAARNRAIGELVLECPPSLVAEALGYSPQVAFLHADKAAEPWARYAGRSIKSP

SEQ ID NO: 4653 - protein, 368 aa, synthetic construct
  REGION 1..368: note = TnsF-Tn7 System Protein
MQVDGSGRVRLVESVPVLRPDEQVLQKMLEGWRNQQLSRNLQFATIDQRLRMVERFMSHVNEDPWNWTPAHVEEFSADLRTHKHVAHSTLRGYHSALQAFTSYISNPDYGFDVVCERFFGTHPAQVFFDWNTAPHVQEYDGRPKKRPYTREEISELFDHADDEVERIGKSGRKGWQAAYRDAVMMKVAYGYGLRFNELRHLQTVDFARNPHAREFGAFGVCKVRYGKAKRSSPHKPRSVLTVWRWTPGIIEDWLANGRGDPGTLDLFPSERGGLVVESTLIRRLRRYREELGFSDGLDLHSFRRSYATHLLEAGWDPRFVQDQMGHEHGATTGIYHFVSDEFRRSTLRAALDRTVKEAMARKTEDGTS

SEQ ID NO: 4654 - protein, 376 aa, synthetic construct
  REGION 1..376: note = TnsF-Tn7 System Protein
MELVPGRIPDHLLDDSVGLLRADDRVFEAMLDRWRTQQLARGLTTAHIKTSCRVVTRFQEHANEYPWTWRPHHFEEFLADLRSGERPLKISTLRSYTTAIRAFTSYVSDTRYGWVGFCERVFNDIPAQIVFDWNSPRHSTDDDVPTGRRALTLNEMQSLFDAADDFVDSEYAKGSKRWLPALRDSTALKVAYAYGLRRRELTRLEYVDFGPNPKVPDYGNFGAMQVRWAKGMKGSGPRRRTVLTVPEFDWVVDLLKHWISPAGRELFATADRSRSLWPSERAGATSLRTFERAFARARQQAGLPDELTLHCLRHSYVTHLIEADYDPFFVQQQVGHQHSSTTSLYTSVSSDFKQKTIQQMITRRLQLDQKDGDHVG

SEQ ID NO: 4655 - protein, 110 aa, synthetic construct
  REGION 1..110: note = TnsF-Tn7 System Protein
MKRKVDYTWRLAELMAARGLHNTTDLIPLLAERDISLSRPQVYRLVNQRPERVSLMMIAALCDIFECESTDLFTTTATDARVRKTGTASPPNVVSLDRSVRPRRANILDE

SEQ ID NO: 4656 - protein, 396 aa, synthetic construct
  REGION 1..396: note = TnsF-Tn7 System Protein
MQRPLCRECGSDTPVQHDCPVCGSTTPGGGASQCAACALKDRVGRRVRLNVELLEQPWVRSLFEGFCAWEELPKAAPIMTKRIDRHALFFADIDRRCSEPQDVTQRRLFEIFGAEGLRRSFVPVSFLVQRLALEWDASALEDMTELRRIHENQQNWHDRPWAKELICYINELQGGGSPPLKARTVRMYQGAAARFVEAANVPSLSAITQTHLNRHMKRYPGQNANLGAFVGHLRRFWNVNLQVPKKTPTSLSKKDRTLVTRVNSLTRDLETVSDPRRARALIAALVAALYQVHLKDVLALSHKDVSEEDDALVLWPATHEIRIDGRLGEMFRRWLLVPGADGLLFVGRNGLQPMSDHAVRHHLHVSRAASPGAPLPETGPPITRMASVVRRPTTGI

SEQ ID NO: 4657 - protein, 187 aa, synthetic construct
  REGION 1..187: note = TnsF-Tn7 System Protein
MERDFLVLLDFDLTVDDVLEQPFRIAFRGADGRQRHYTPDFLVEYENGNRVIYEVKYRSNLKDDWASLKPRFRAAIRYAKTNGMRFAIATEVEIRGTSYLANAKFLRPYRDCTPAPAIDEHLIKTLVVLGETTPESLLAAAYWSLDNRIKAVAPLWRLIATRRIHADLYEPLTMTTPIWTTLEDGLG

SEQ ID NO: 4658 - protein, 355 aa, synthetic construct
  REGION 1..355: note = TnsF-Tn7 System Protein
MIGGTWPYRVPLYEDELLSSFLVRNAYAHGTTPYCFLNLYWPGKHIWNRDIDRTVDHDWLDALAILAGIPAAQLEASTLLPLRAILGSTLRNGDTPLLLSASVFHRTRRRHSLQFCPICLVEGRRWFRRIWRLGFVFVCPEHGNALLDACPKCGSPVVPHRSLGLDPSRCHQCGTFLGNEARETLLQTGVLEWQNLLLGALSSPPRLAGPFVQSEAFAVVRSLLSVLTPRPVHTAIREAVHLPLVALPADRLQFEHARIRERALLMETLAAWVADWPVTFRRGAHAARLTQRAFRRLTQPATLRSEVEQLPLGIARDRAYVPKVLDNQLRRLARKDRSAYRALRARRLQELVGLV

SEQ ID NO: 4659 - protein, 644 aa, synthetic construct
  REGION 1..644: note = TnsF-Tn7 System Protein
MTDAAFLSVKPGSIVVSDGRHFKITHVLGINSVLAKNLASNAVEQLRVDLIRPSQNDAALDGVVTTSGQDIEDICDEDWKEVQRRFAAIKPLLEDSRRTREKVRAAAASQGVSTGTLYEWIRAYNDAGRLSALIPQKRGRKPGQTGLDDNAEKIIETAIKEIYLSKQRQKPQDVVNHVAYLCRNAGIQPPHANTVRNRLKALRPERVLKARAMGDKARNLFAPIMGKFPGANFPLAVVQIDHTEADVIVVEEITRLPMGRPTITLAIDVYSRMVTGCYVSMEKPSAVAVGMCLARAMIPKNEYLADLDIPGDWPVWGKISTVHCDNAKEFRGAMLSKACQQYGIDLQMRPVMVPHYGGHIERLMGTSAGEIRKLPGATFSSPKERKGYDSEKESALTLREFEQRLVDFIVNVYHQRLHGELNVPPRRQWEIGLLGDTFQPGKGIPEIPSDHWRLKLDFLPFVERTVQPYGIVIDDVFYYHEVLNPWINARDPDHTKDKRKFIIRRDPRDISAVHFFDPDAHQYYEIPYRNTGHPAISVWELRAAQQRLKEQGLAHVDEEAIFEAVGRMRERVEAAITKTKAARRQLHRVKTTQQSAKARQTSPTVLAPTASVTIDRPTPTVPSVDPDDIFSMPIRPFDDLTVKQ

SEQ ID NO: 4660 - protein, 232 aa, synthetic construct
  REGION 1..232: note = TnsF-Tn7 System Protein
MIPIIRLIVGIHSGSQPRPGEISLAHHGVLFLDELPEWDRRVLEVLREPLESGHITVSRAARQADFPARFQLIAAMNPCPCGWAGDPSGRCRCTAEQIERYRGRISGPLLDRIDLHIEVPRVHAPEMRPDAPRGESSALVRGRVEQARGRQMARAGKPNAHLSQHETERDCVLAGQDRQLLERAIDRLQLSARAAHRILRVARSIADLDQSAQISTVHLGEAIGYRRSDRRA

SEQ ID NO: 4661 - protein, 296 aa, synthetic construct
  REGION 1..296: note = TnsF-Tn7 System Protein
MSELDHLEPFVRSAMSLSTEERITFAQQDRWIGHTKAQEALRSLSDLLTHPRTVRMPNLLLVGESGNGKTTIIERFRELHPVVSQPGGEPSMPVVVMGMPSEPVEARFWTELLLALKIAHRDTDPVQRKMNQAHSILTYVQCRMLVIDEIHNILYGHARQQRHFLGVMKNLSNALKLPIVAAGTRDAIRALHTDTQLASRFEPFGLPRWQLNAEFLRLLASFERLLPLAKPSALTSRETAIQLHSMSGGTIGGLSRILKRATIQAIRDRSEHISAKLLTQIHWVKLSDYGKQAQAL

SEQ ID NO: 4662 - protein, 296 aa, synthetic construct; identical to SEQ ID NO: 4661
  REGION 1..296: note = TnsF-Tn7 System Protein

SEQ ID NO: 4663 - protein, 492 aa, synthetic construct
  REGION 1..492: note = TnsF-Tn7 System Protein
MTEWPARPSFGFARRHGATVTGYRDGLAEVAWRPGVTAEILAELRRHTGRALHLIEHSAASYEQLLRGLYEGGGDDALAMAADLDEHPDLHELADALPEPQDLLESEDEAPIIRLINALLTEAVKENASDIHLEPFEHRLVVRFRVDGVLREVLSPQKAVAQPVVSRIKVMAKLDIAEKRLPQDGRISLRIAGRPVDVRVSTIPAGHGERVVLRLLDKQAGRLDLTQLGMDEATQSHIDRLIHRPHGILLVTGPTGSGKTTTLYAALSTLNDTTRNILTVEDPIEYYLDGVGQTQVNPRVEMTFARGLRAILRQDPDVVMVGEIRDLETAEIAVQASLTGHLVLSTLHTNSAVGSVTRLRDMGVEPFLLASSLLGVLAQRLVRRLDPETREAYCPSPAECAAFGREWNADLRFYRPREDLTGRNAGYRGRTGLYEIVIVDEVMRRLIHEGAPEVELVRQARNRTRNMLDDGWNKVLAGITTADEVLRVTHED

SEQ ID NO: 4664 - protein, 492 aa, synthetic construct; identical to SEQ ID NO: 4663
  REGION 1..492: note = TnsF-Tn7 System Protein

SEQ ID NO: 4665 - protein, 421 aa, synthetic construct
  REGION 1..421: note = TnsF-Tn7 System Protein
MIRDENAYCGSCANRLRYKGPKPKPDHATCASCRRHRKVAAKTRDGKPICANCIDPKRAEIEKQKLDDYWFARHYDDTYRLASTLPNDTLQALFVEFSLEIAERRGHSVVTLDLQKHLYALIQINELVGGLDDPVMEYFSSRVDAQTLKKYSLWWAFLEGEGFPVPSREESRRLSDSRRISTAIRELPSEECQILARDFLADLNKSKKPPTTATQRLYVRAATKLLREYGPEFDQTTLETWISNNPGHRASIFRFVAYVNRINDTTLKVSKKPGKKRPRGHRKEVADFETLLYYLTEAKSKEARRSLLVATIVHIWGIDITSACSLPSSSISVGKESVRLKVQSTWVLLEGDLAAAFRRHISEWRLSVDQENRPLFPGKPITESVSPQTVNYHLSQSGVSLLAARTDARRDIRRKFRRSTA

SEQ ID NO: 4666 - protein, 308 aa, synthetic construct
  REGION 1..308: note = TnsF-Tn7 System Protein
MQIPAAALDKLDELSGEDGVSDHSGTRIQLAVDESDLPNQAIRGVRTSSLVGTLNGIPALATWDSGDNDREEPFSSKVPDTQLMENISAQGSTGTAKSSGKHRKLEVIENKRRKSPRMPIVESLYTIGQAMEKLGSWRSAEFLHLGLGEKVELKDDPEGGFATEIHVSTAGLDAKQVNWINEGGAKRCIAALRITQNDWPVYLVEVEPRSAGLTKPVAFKLLLARPWHQVNHDCDTLRQTALDCRGVWPKEIDGFDTYCYLHTWPNVDHIARRIDKHVSEWATKPTDINNVPMTPFDEPLADLEFLQQ

SEQ ID NO: 4667 - protein, 288 aa, synthetic construct
  REGION 1..288: note = TnsF-Tn7 System Protein
MSLSIVHSRAEVGIQAPAVRVEVHVAGGLPGLTIVGLPNSGVREAKDRVRAAIQTSGFKLPPRRITVNLAPADLPKDGARFDLAIALGILQASGQLDADLEACEFVAELSLSGGLRAVSGVLAATLAAKSVQHAIVVPAQSAAEAALTQHPGARQAEHLLEVCEALTGQRQWTTAKRAHGHAIEPAHTASDFAEVRGQSRAKRALEIAASGHHNVLMLGPPGSGKSMLAQRFPGICPALTEQQAIELASVQSTMGASFDPAQWRRVPFRSPHHSCSAAALVGGGSKLH

SEQ ID NO: 4668 - protein, 288 aa, synthetic construct; identical to SEQ ID NO: 4667
  REGION 1..288: note = TnsF-Tn7 System Protein

SEQ ID NO: 4669 - protein, 251 aa, synthetic construct
  REGION 1..251: note = TnsF-Tn7 System Protein
MHSAKQEITETVKFLTWLHQTHHRTAATCTQQDADEWLAGGPTTRTMIRNFFQLAKKSRLNTGVTVAHRTPRSSPSLSQEQRLAWIRELLTGTSESLPYRVAGMLLLLYAQPLVKVVTLTTEAIAESPHGMRIQLGRHPVDVPEPFANMIRQHRDARPNLRTAAGTDSPWMFPSILAGRHLHPNTVMDRLRALGVNLLGARNSALGELVLQCPPSLVADALGYSHHVAFLHAEKSAEPWARYAARHAGDQR

SEQ ID NO: 4670 - protein, 251 aa, synthetic construct; identical to SEQ ID NO: 4669
  REGION 1..251: note = TnsF-Tn7 System Protein

SEQ ID NO: 4671 - protein, 336 aa, synthetic construct
  REGION 1..336: note = TnsF-Tn7 System Protein
MRLQNLGYAVTAHRAQGATVDTAHAVVHSPEVTRESLYVAMTRGRESNRVYVATDEHHLEEHQHREDLQNTARSILYGILQHPGAELSAHDTITVEQDFWGSLEQLAAEYDTIAQVAGQERWIALLHAGGLTAETIDELVETDAFGILTTELRRLEADGHDIDSLLPRIIQVGGLDEVQDLGSLLRYRLQRITAAYQPAPQRTARMIAGLVPRATGITDPAMRQALDEREQLMEQRIDALVEKLLKQPEPWLTGLDETAPAEGEAAARAVIAYRDRWGVTSSSPLGAVPGDDAQRVDYERAQGVLVSLQQTEHSRRKCGPDGVRGGRFPDVCGRYS

SEQ ID NO: 4672 - protein, 336 aa, synthetic construct; identical to SEQ ID NO: 4671
  REGION 1..336: note = TnsF-Tn7 System Protein

SEQ ID NO: 4673 - protein, 202 aa, synthetic construct
  REGION 1..202: note = TnsF-Tn7 System Protein
MGRSGRKGWQAAYRDAVMMKIAYAYGLRFNELRHLQLVDFARNPHAREFGRFGVCKVRYGKSKRSSPYKPRSVLTVWRWTPPILEDWLANGRGEPDTLDLFPSERGGLVGEPALLRRLRRYCDELGLSDGLDLHSFRRSYATHLLEAGWDPRFVQDQMGHEYASTTGIYQFVGDEFRRSTLRSALDRTVNEALARTTKDGTP

SEQ ID NO: 4674 - protein, 110 aa, synthetic construct
  REGION 1..110: note = TnsF-Tn7 System Protein
MKRKVDYQWRLAELMAARGLHNTTDLIPLLGERDITLSRPQVYRLVNQRPERVSLQVIAALCDIFECTPADLVTTTAADVRRRKTATEPGSNVVSLDRSVRPRRANILDE

SEQ ID NO: 4675 - protein, 260 aa, synthetic construct
  REGION 1..260: note = TnsF-Tn7 System Protein
MRINVAIAFLAWLDDQELTLGIVDQNAIDRWVTTGSSLRYEARHFLCWATERRLVSKVEVPVRPKSANGYRAIEADERWSLLNRLWHDSTIPLDVRVGGSLVLLFGQHLSRIVRLTTDCIADNDHAVTLILDRSPVSLPEPLAALVMELRDQRLAARPSANPPAQCLLFPGRPASHPISTEPFRKRLALHGIQARPARNAALTEFAADLPAPVLAELLGLHIGTAVTWTKTLQRDWSAYLEARATTGNATDLTTNSAHFE

SEQ ID NO: 4676 - protein, 260 aa, synthetic construct; identical to SEQ ID NO: 4675
  REGION 1..260: note = TnsF-Tn7 System Protein

SEQ ID NO: 4677 - protein, 797 aa, synthetic construct
  REGION 1..797: note = TnsF-Tn7 System Protein
MKDDLQPAELAEELTELRELTTQLRTENARLLRLLELTPKQAAPPGPIQTGFFEAHPGLVDRRSAPEVKVDFFAARIDIYATRWENARTGKAGWLPAVRGGWRKGARHEDRDYLPLSKDVLRTHLVGDVHVGLYPLLDGDLCWWLAADFDAPMAMLDALAYLKAARAWSVPAALEVSRSGVGAHAWVFFTAPVPAETARRLGTALLREAMAVRGRMDLASYDRLFPSQDVLPSGDVGNLIAAPLQGKARQDGATAFLDLATMEPHDDQWAYLSSLGRMSPAEVNRVARRAGGVTVGASIDKIGAAVSTRIRTAAPPIVHARLSSGIRLESEELTPALHATLKHAASMTNPVFYERQRLRMSTWDTPRFLSSYDETLDGGLILPRGLHDTVASLVEQAGSRLEAIDGRQAGETQEFTFAATLTRQQQDAVDDLRDHDLGVLVAPPGAGKTVMACAVIATHAISTLVLVDRKTLADQWRTRISELLGVKAGQLGGGRRKTHGVVDVVMLQTLARKTDIEELASGYGLVVVDECHHIPAAAFEHAVKQIPARRWLGLTATPYRRDKLDDLIALQLGPIRHTIAPSSRPGEDSAPQLELDTTAQRPKPVLHVHDTAYRYTGDADPTKPGGMAAIYRDLVADDTRLTQIADDVTAALKRGRHCLLLTQWTTHVERFADELRRRSLDPIVLRGGMRATARRDALARLQPADGVPLLVVATGPFVGEGFDCPALDTLFLAAPIAFKGRLVQYAGRILRAHAGKATAEVHDYHDINTGVLASSLAKRAPGYVSLGFPDPRRPATR

SEQ ID NO: 4678 - protein, 797 aa, synthetic construct; identical to SEQ ID NO: 4677
  REGION 1..797: note = TnsF-Tn7 System Protein

SEQ ID NO: 4679 - protein, 371 aa, synthetic construct
  REGION 1..371: note = TnsF-Tn7 System Protein
MAQGADLTGSVQAVLPVGVRYLDPEPAVFEAMLEGWTRQQHSRMLRETTIGECVRLVRRFAEFTGQYPWQWVPSEVEAFISELRSGSKPVAFSTVRGYQTTLRLFVEFVTDPRYGWPAECQTRFGMVPSQICHEWNTVTHSAEFEGQPARRALTYDELQTLFDAADDRVAQIRGRGRKGSLPALRDAALVKTVYAFGLRRREASMLDVADWRRNPRAGDYGRFGAVQVRYGKAVKGAPPRRRTVLTVPEMDWIVEVLQHWVGEVRAQFEPGGHGAMWMTERRGRIAVRTLDEAFAEIRSLAGLPAELDLHCLRHSYVTHLLEFGYPELFVQQQVGHSYASTTAIYSSVGDEFRNRLLEQSLQRQIKEGTPR

SEQ ID NO: 4680 - protein, 108 aa, synthetic construct
  REGION 1..108: note = TnsF-Tn7 System Protein
MTKTMSYRWHLRQLMAARGLFQTSDLVPLLAERGIHLSREQVYRLVTQRPQRLSLDILAALCDILDCGVGDLIEVTAEPVEVRKTGSTTGKSTASAPKRTVVRRPENP

SEQ ID NO: 4681 - protein, 406 aa, synthetic construct
  REGION 1..406: note = TnsF-Tn7 System Protein
MICPRCRLIEQTTEILDDGSGQVAPALRPLHQAICSQPNPGTGLVWLHYNPHVVALMADLATGRLPLSHTTLDEHASRQAVIHLRDLLVQLQLLPYRDRYLALFENWLRRTLDAIEPAEDQQLVRRFATWHSLRQLRQRAAREALRPGLTNRPRHEINTATVFLAWLRDHGVAPETCTQTHLDTWITTGNTSRQGSRPFVVWATKNGTMPRHLHLPYHQRTPHETLTQDERLQLLRDLIDPDKPFVLRDRAAGLLLALFAQPLTRVVTLAMNDLDLTGDEVQITLGPHGPVPVPEPFGQILLDHAANRGPRNIEANRSSTWLFPGNQPGQHMHSTKLMNRLSKTGINLLGARLAAIRTLVSEMPPAVVAQALGYTAECAEDHATTAGAAWSSYASHRRQRGELTTP

SEQ ID NO: 4682 - protein, 406 aa, synthetic construct; identical to SEQ ID NO: 4681
  REGION 1..406: note = TnsF-Tn7 System Protein

SEQ ID NO: 4683 - protein, 180 aa, synthetic construct
  REGION 1..180: note = TnsF-Tn7 System Protein
MTGVTVWLTGLPSSGKTTIAHEVAARLAERGTRSQILDGDELREQLCADLGFSRVDRETNVRRVGFVAELLARNGITALVPVIAPYAGSREEVRAHHLRAGTSYLEAFVDTPLDVCAGRDVKGLYARQRAGEIRGLTGVDDPYEPPEAPDIHVVTVGRTVAESAGEILAALDRRFAMVAG

SEQ ID NO: 4684 - protein, 180 aa, synthetic construct; identical to SEQ ID NO: 4683
  REGION 1..180: note = TnsF-Tn7 System Protein

SEQ ID NO: 4685 - protein, 341 aa, synthetic construct
  REGION 1..341: note = TnsF-Tn7 System Protein
MTGRVALTHEALDGAIETTHGSGAIAFVRAALVHEHALPERDEITAAFSRWAQDATSALQDGPDRALVRAYANWHLAPRLALSVRAGKTGSAPAKYARSLLSEAIGLTCWLHAQELKLSDLRQDLTDEWISEGAGARRRVRLFLAWLARTSSTATLHVAWHEVGEHVRPLGELERFEILRTLLHGEEIDARDRLAGSLLLLYAQPLTRTARLTISDLHETDRSVGITLARGVVALPDPLARIALELHRGAGTSQWLFPGRNAGTHISPEQLLRRLARYGITGRSGRQGALLALAARLPAPILAERLGVHQARAAQWARAAGATYAEYAALRARTSNPSHAA

SEQ ID NO: 4686 - protein, 341 aa, synthetic construct; identical to SEQ ID NO: 4685
  REGION 1..341: note = TnsF-Tn7 System Protein

SEQ ID NO: 4687 - protein, 429 aa, synthetic construct
  REGION 1..429: note = TnsF-Tn7 System Protein
MLRYPGFEEPVCRECAGAPHDHVCGRCGAEEALYSRDLCARCVLHARLIELLGDQPRRVELGLNGLFEELSAAGSAKDMIRWLSNSPAVPLLGQIVRGELPCTHETLDRHPSNGAVRRLEHLLVATGALPARDPVLARLERWIEELFSAEDDDQALRTFAHWVILRRYRRKSQRAPLNDGVLGHAKVELQSAGAFLEWLAGRGRPLDACQQSDIDAWLAGPRADRYIARSFARWAIARKLMPKLDFPVGERGGPSQPIIDQDLGELVQRLLNDQQISVRDRVAGILIAVFAQPVTRVARLTADDITLEEQTVAIQLGDTALTVPKPIASDVRKLLSELAKPSSGIVRHPLWLFPGNAPSRPIGALALSRRMKRIGIDCNDARRAALLQLAGQLPAAILADLLGVHISTATQWAEIAGRPWGDYPALRSQ

SEQ ID NO: 4688 - protein, 253 aa, synthetic construct
  REGION 1..253: note = TnsF-Tn7 System Protein
MICEREFGRGPGQLFGERNLVAHLDDFEGDPRRRPLTVDELEAFFGACEARIAACRARGRKGSLQAWRDQALFKVKFAWGLRRAEVAMLDICDFRPAGKLPEFGAYGQVHVRYGKAKRGGGPQRRTVLTVFDWAVEVIEQYVSEIRPSFGCPEHPAVFLTERGTRIAVGYINERFAEIRDEAGLPQQLTPHCLRHSYVTHLAEQGWAAQFIQDQVGHSHAATTAIYLSVGDDFKDRLVRAAIDEQLAELAAVR

SEQ ID NO: 4689 - protein, 338 aa, synthetic construct
  REGION 1..338: note = TnsF-Tn7 System Protein
MFDGMLAGWGAQQRSRMLNEVTVVGRDRLVRRFAEFTNEYPWSWRAQDVEAFTTSLRSGGRAHSTIRGYHHILGLFGDFVCDARYGWVAECEERFGQAPALICHEWNTAAHVSEFEGRPGRRALTREELQRFFDFADDQVDRVAGNGRKGTLAAFRDATMFKVVYAWGLRRREAVMLDIADLHRNAKAPQFGSCGALHVRYGKASRGSPPKRRTVLSVHDWAVEALRQYVGEVRDGFDPGRHPALWMTERRGRVSARHVNARFASYREGAGLPVELDLHCLRHSYVTHLIEAGFPERFVTDQVGHAYAATTAIYTGVSDDYKNRVLARALGGAFGVAS

SEQ ID NO: 4690 - protein, 113 aa, synthetic construct
  REGION 1..113: note = TnsF-Tn7 System Protein
MGVRWHLREVMATRGMFSTTDLIAPLAERGVELSREQVYRLVTQQPERLNVYTLAALCDLLDCSVGELIEPVLERRQQRKAAGSPDERATRKVRDGLRPVRARIVDPDKPPAA

SEQ ID NO: 4691 - protein, 108 aa, synthetic construct
  REGION 1..108: note = TnsF-Tn7 System Protein
MSVDYEWRLRVLMAERGMFKANELAPRLAEHGIRLSDSQVWRLVTGRPERLNLRVLMVLCEILACEPGELVRRSELAAPIAMDPASSTTIDKALEPKQVRLRRPGGRS

SEQ ID NO: 4692 - protein, 285 aa, synthetic construct
  REGION 1..285: note = TnsF-Tn7 System Protein
MRTGPWRIFRDARRRADRGPYREKAAGADRGRIRAAIQFLDWLETLDTPLNAVSQHHIDAWFDTHRTKHQTLVAFLRWLRDRHLVADIEIPTTDHGLPQHFQTRDQHQQQLRRCLTDPTLPLEVRVVGALVRLYAVPLTQLVELTIDQFHRTDTSAHLILDRHRTLLPPSLAQLVDDLALRPGADSLTRGTAGISPRYLLPGRPPSRPRNPYGLANLMRRHGLPLRVARNTAMITAMADLPATVAADILGIAPNTAAKWARYAQTDWAHYLSHHEQPSANSANCP

SEQ ID NO: 4693 - protein, 285 aa, synthetic construct; identical to SEQ ID NO: 4692
  REGION 1..285: note = TnsF-Tn7 System Protein

SEQ ID NO: 4694 - protein, 675 aa, synthetic construct
  REGION 1..675: note = TnsF-Tn7 System Protein
MELLGGADRSRQRVAHAMAVLGIASGVDPVATLLAAEPDEIRGVVAEFTEIGVAAQGRIAHPTLAARILRELPDEERRALHGRAAEVLYRNEFPVSAVAAQLIAAGEARTSWAAQVLVEAADEALINDDIDGAAQRLELAYRASRRAGGRAAIATRLVSVERRVNPSTRTRNFGRLKAALYTGRVPESELPSAVLHMLWHGLVQHADHALARLDRGPAGQYCVDPAVDFLCAWLRYTHPTHVERHRRLFAARIPDGGRARIDRDSPYRQSADLLAAQSVQHPPAEIAGLAQRILTGHRLASTTVEALVAAVDCLIHTDRLDTAEAWCASLLAEAEARRAPAWRSIFAALRADTLLRKGNLTGAVDDAVLALNLIPAEHLGVWVGRPLAVLVRALTAQGKHSEAAAQLRRPVPRAMFETRFALPYLHAFGHHCLATGRPAEAVRHFRQCGNLMRQWNLDFAWLVPWRNDLAAAYLELGDQRRAQALATMHLELIGGPDRHRSGGVSLRILAATGDPHRRVLLLRRAVAVARAGGDDHELATALTELGRAHRCIGDADKARPLLREAVRLAESCGSAALARRLRGDRTPPPSPSTPQPRVRLSPGSVDALSPAERRVAELAALGKRNRDIADALAITTSTVEQHLTRVYRKLSVARRSELRFVLTARATAAAETAVG

SEQ ID NO: 4695 - protein, 675 aa, synthetic construct; identical to SEQ ID NO: 4694
  REGION 1..675: note = TnsF-Tn7 System Protein

SEQ ID NO: 4696 - protein, 492 aa, synthetic construct
  REGION 1..492: note = TnsF-Tn7 System Protein
MNARRAPVCIRCERLTGSFELPEGKICQNCCRYLAYHPARCPGCSQFRPLPYLSVTAPAQLICADCAGKPPVFVCEKCGRQDQPYGVRRCASCVLSERLHVLLLDPRTGEIHERLRPVFDALVGSHRPQNAITWLQRPPGHGPTLLRQMASGEVNISHDTFARRPMDRAHNYLRDLLVALEVLEPYEPLIERIGPWLIDRVAGISAMHRQTIDQFARWVILRRLRTAADQGRLTKAMAEGARQRLNRSIDLLAWLEHKQTTILEVTQHRLELYLSTQVMSMSMMLHPFITWINRTGINNRISVKNPNPSQAHVTMGDADRWRHIGTLLRDDSIRLYTRIIGLFILLFAQPLTRAYDLRTEQVTAPQRGPVLVTFRETPVEMPEPLGMLIRQQLTHRVNASYASLDNGWLFPGGIPGRPIATENIRGQLVELGIPPHQARHAAMFGLSAEVPHMILAQTLGISQTAARAWAGLAARDWGGYIRERNDRGKLSP

SEQ ID NO: 4697 - protein, 492 aa, synthetic construct; identical to SEQ ID NO: 4696
  REGION 1..492: note = TnsF-Tn7 System Protein

SEQ ID NO: 4698 - protein, 495 aa, synthetic construct
  REGION 1..495: note = TnsF-Tn7 System Protein
MVGALWFTVQVVAAVTLTHAISACVCWLIGGLLLSVSSWLAHHGEARFSARLRRDTARHLAHMPMSTVSRYGADALRRLVGEDIAALHHTVAHLPAEIATLAVVPLATVTLLVAVAGPLTLIALIPGLLAAAYYLFIVPRSSAKHGTETVRVMTDIRTAVDDYARGIRVSRIYSAQAGATANYADAARRFTENMVAWVRRVATLSSVAVALLQAVATYAIAYAIGYDQEPAVLAAMLLFGLAVVTPALRLGHGLDYVRAGSAAAERIAAVLREPTVTGSTDHSDDPGLELVDVRIGQDDRTLIHSLSHTFSPGLVTAITGPSGSGKTTLLRTIAGLETLESGVIRYPHRETNSEKTSPDSVLLIPQGGDVLSGTIRENIALSTPEATDDEISTALRRAQLDLPLDTATTTLSGGERQRVGLARAFLTDARVILLDEPTSALDKDTSGRLVSELHTFVMEESKTLLIVTHDHGLAEGATAQLKLTGNSVTVAGGTR

SEQ ID NO: 4699 - protein, 495 aa, synthetic construct; identical to SEQ ID NO: 4698
  REGION 1..495: note = TnsF-Tn7 System Protein

SEQ ID NO: 4700 - protein, 532 aa, synthetic construct
  REGION 1..532: note = TnsF-Tn7 System Protein
MNTQHTQTLPAAARRRLVLISLGWALVALAEATAYTVLALAIAKHQPPGMVIATAAVALFITVLVSRSGYLTGARLAGDLFQGVGAAFSHAKLSWFTEKNRTLVGTVAGQSIPALMSVPAHQLQTFILSPLIPLLLLVGIAIVAGPLTMLLVAGLVIIAFLAQLLAQRALSRADAGRNTVEQATTEASLEFIDHLELLRTAAGPDRAVARLEDRWDSEEAALARTNRVSTPATFVSSLASILPLAGVLLFIASTAIDDPATALALIILTARASAPLDALALAGVSINELRTTINRYRAVLSAPVLPEPTKSVQSVGHAMTVNDVSHITVLKGISTEVPEGSTTIITGPTGSGKSTLLSLLMRFDDPDNGRIELGGVDLTDMRYEDLAQRIGYVPQDPVVFDGTLADNIRLGDPSATDEEIIHAAKQAALGQVIEQSPLGIQQSVGHHGNALSGGERQRVAIARALLKQAPILILDEATSALDTATEAKIAETIRALPCTKIVVTHRDADTTWQPTGHIALGAPSGRNTNDLW

SEQ ID NO: 4701 - protein, 532 aa, synthetic construct; identical to SEQ ID NO: 4700
  REGION 1..532: note = TnsF-Tn7 System Protein

SEQ ID NO: 4702 - protein, 372 aa, synthetic construct
  REGION 1..372: note = TnsF-Tn7 System Protein
MVGEFPGSARLMLVPGVAHLNERAAVFEAMVAGWTRQQLSRQLGQSTLRDRERLIRRFQDFTEQYPWEWTPGDMEDFTVSLTCGADRLAVSTIRGYHLTLRMFCDYVTDARYEWPVQCQDRFGTFPVQVCNEWNTVAHLNEYEGRPQRRPLTYRELQDLFDWLDTRIEQIVRLGRKGSLAAWRDATMIKTTYGFGLRRNELVRLDLPDLRPNPHMRAWGTYGSIHVRFGKAMKGSLPRRRTVLAVPEFDWAVNGLRQWVEEGLPLFEAGNQAALWLTERRSRVSVRHVDELFADTRSEIGLEEHLTLHCLRHSYVTHLIEFGYPEHFVTEQVGHRWGSTTAIYTSVSNDFKNKTLQAALARVYRTEEEASPS

SEQ ID NO: 4703 - protein, 1206 aa, synthetic construct
  REGION 1..1206: note = TnsF-Tn7 System Protein
MSGAGEAGARPGAEPTTLGAIVAGHRFGLVGSAVLAVVGTGCSLAPYLAVYAVTVALFAGPSADTAAVGWIAWWTAVALVVRAIANGLSTHVGHVAAYRILGDLRRAIAAKLQVLPLGRVQARSTGELKKVLHDDVEQLEEALAHGVPDGAAAAAVPVATTIALFVVDWRLALVALASLVLLVVVSAIGMRLAQRNNAALAEHSTTLSRAVMGYLQGIKVIRGYLRPDTGYDQARTAVIEAARLQTAATAGPVRWLVAAMTVATGLTVALLIPVAGLRFASGELDLPTLVLFLLLALGYLTPVMGLVGTLATILVRIQLAAGTITEILAEDPLPAPAEPVVPERFDVEFDDVRFAYREDALVLDGISLIARERETLALVGRTGSGKSTLARLVARFSDVDSGAVRIGGVDVRQIPTESLAGLVAFIQQDEYVLAASLLENIRIARPAATEAEVVAAAERAQLGDVAAALPEGWATELPAGGGVLSGGERQRIAIARAILKDARILVLDEITASLDATTERNTLDALDEVIAGRTVIAIVHRLSTIQHSAQIAYLDQGVVAVTGDHEGLLETCTPYRELWHSYRDAEGWRLEASTAPVPAPAPATNVAENLPDSAADEWGQAARSVVRAHIGGLGFARQWRALYGRSWQTLWRRGFVRLVAESLVRGAPLIAVFVIVMAAIGEGWAGGLDASLVWTVTALLAGMLVLRLLASVWSNALVWRLSARSKADLQLSVLERLRRVPLGFFGRVDNGRIATLVGNDTAMIDFQNVPQQIVGGLVQPVYAMIILLVIDWRLALAALIGLPLFWLLTVWSDRIHHRAFADLYAARQEATVALLDQARGAAVLRGNPGSAMASRYDTAISRLSEASTAMSVRATPATALGSIAVESGQVVLIVVGAGLYATGAVPAVTLLAFLFLSLTIYQPIQELMMLAGYRRNQQQIAAKIGEIWDAPVLSEPERPIEPADGSVEFRDVSFTYDGASQPVLTGVSFRAEPGQITALVGPSGSGKSTIAHLAARLWDVPSGHVLLGGVPVTELGSDRVMAQVAVVHQDVYLFDDTVRHNLALGHPHATDDELWAALEAAQCDDVVRALPHGLDTVLHDGGTDLSGGQRQRLAIARALLKDAPVLILDEAVAAVDPGTEDRIQRALSSLVAGRTVLVIAHRLTTIAAADRIVVVEHGRIAGIGTNTELLGDCPAYADLAAQQGAS

SEQ ID NO: 4704 - protein, 1206 aa, synthetic construct; identical to SEQ ID NO: 4703
  REGION 1..1206: note = TnsF-Tn7 System Protein

SEQ ID NO: 4705 - protein, 235 aa, synthetic construct
  REGION 1..235: note = TnsF-Tn7 System Protein
MRQLAPELLITAKTQRWSPEEVLRALVEAEVAARDASNERARRKAAAFPVLQTIEEFDLGASAIPAPTWAYLSSLEWVGAKENLALIGPAGTGKSHTLIALGHAAVVAGHRVRYVTAADLVDTLYRHLADNTVGKAIETLLRNDLVLVDEIGFAPLDDTGAQLLFRFVAAAYERRSLGIASHHSFEDWGRFLPEHTTAVSMLDRLLHHATTVVTSGQSYLMRQARARQGGEHLPH

SEQ ID NO: 4706 - protein, 235 aa, synthetic construct; identical to SEQ ID NO: 4705
  REGION 1..235: note = TnsF-Tn7 System Protein

SEQ ID NO: 4707 - protein, 112 aa, synthetic construct
  REGION 1..112: note = TnsF-Tn7 System Protein
MRTIQMQWNLRQVMADRGMFQTSELMPLLEERGIHLTREHVYRLVTKTPQRLNTEVLVALCDALGCTPNDLIVPVVAEQRAARTGTHNEGGPKIGSIRPIRAVIRRPDGVDE

SEQ ID NO: 4708 - protein, 503 aa, synthetic construct
  REGION 1..503: note = TnsF-Tn7 System Protein
MNQDHLPTSAVCARCGRPVCSDYAKIKGDNRLRARWGWPEGPVCVACYEQAINTYGRCGDCATDRLLPGRRASDGSPICTDCAGGLGDFICRRCGQEGPGYRTDACTRCVLADRLTELLDDGSGAVRPELEPLFHLIHAMSWPASRLTWLRREAPVSVLSALARSEVPLTHEGLSRLHPWRSVIYVRDLLIDCGVLPPVDRFLLLFEQWLPDWLATINDPAHRKLLERFATWHVLRRLRQTAREQPINSYRANNARRLLRVAVLFLDDLAAHGRRLDECTQTDIDRWFTAENRDSKCSREFLQWALRRHELPRLHLPTSPSSIAARLSQRHRLDQVRRVLTDETIPDADRVLALLILLYAQPLIRIAQLTTDDIIRDDDQVLLRLGDPPTPVPPPFAEVLTRYLDNRLNLTTAGGATNPFLFPGRRPGQPLHTTSLRLRLRNLGLPSRDGRTTTIRQLVLQAPAPVVAGMLGYHPNTTEQLAAEAGSTWKTYAAGDHARLGNS

SEQ ID NO: 4709 - protein, 503 aa, synthetic construct; identical to SEQ ID NO: 4708
  REGION 1..503: note = TnsF-Tn7 System Protein

SEQ ID NO: 4710 - protein, 1035 aa, synthetic construct
  REGION 1..1035: note = TnsF-Tn7 System Protein
MGARPHTLHQVTTALDRGNAHRRFAFTRGDVLVIDEAAMAGTHTLHTVVSYALGRGADVRMVGDHRQLSAVEAGGAMRWFAHQNAESVLKLHEVVRFHDRAQAQASLLLHAADPSGLDYYFDHERVQDGSLETMRDAAHRAWRADLDAGLQSLLIVPSNDDVVDLNVQARELRLARGHVNDERSVRLHDGTTASAGDWIVTRHNDRLKTLFRGTDFVKNGDTWTVQRVHDNGSLVLRHQATGGSVRLPAEYVREHVELAYAATVNRVQGMTSEHTAHSVITRGTSREQLYTMVTRARGQNRLWVETHEHTLDSHHETPLERTARGVLENALQRSSAETSASEELRDSLGSEESLRTLVARHTHVADLGRAERIDAVLTEHVPELLDLDGAGALRQQLRSAEHLGWQADRLVPDLATGLADADNPTALLTWRIRDLVAHHQPPARTTTPTAEQMSRWRSTIERHDHTTAPEEPEWNRVWERAAAAAAEGLDADAAIRSATHALNTRPATDPAPASTVAAEVVAAACAEQCGHRPVPCLAHADFRSLSADEADYLHRLQLAITDRVTELRQTTVAEPPRWAAGLGPRPDEPRAALRWEELLGHAAAYRETYDIDATDPASPLGEPPGGQNLRAHAWRHIVDRWMPEAHPDTDRRDPTDRLREEFGEPFMATLTATDPTTEHRTEQPLSDTVHRREQLVRSLLDQAAREALAIHAPTALGTPAEEALLRTLNDATRAGWQPHRLLPRLNELDDALDPAALLAWRIHRHVDGREPPAPTAEPTTDQIEHWKGLIQHTEQPDWSSWSTVWRHAAAASAAGLDTDRALTDTTHALHSRTELNPREVTQRLVDHLADQRATGLGHQPALPWMSSLPPDIDTGQLDDLDHAIHGRLTELREATTANPPRWAANLGPRPDGPHAAEQWAELLTRTAAYRETYGVRTDHPDLPLGPQPHGDNTRTQNWHTLNSHWRLPMNPEHPEHTQRRLNNLRENLIDAQDDRRDDRTDQREHLSDEHDRRHAEEEHHHTQDHGRGSGLSHGA

SEQ ID NO: 4711 - protein, 1035 aa, synthetic construct; identical to SEQ ID NO: 4710
  REGION 1..1035: note = TnsF-Tn7 System Protein

SEQ ID NO: 4712 - protein, 373 aa, synthetic construct
  REGION 1..373: note = TnsF-Tn7 System Protein
MSKNDGFPGSVGLHLADGVPLLHPEEQVFAAMLEGWRNQQLARNLARSTVEAQQRQVRRFFEHAGEYPWHWSPQLADEWFTDLRAVHHVSKSTVRGYQGALRTFCSFLTDPAYGWAAECEQRFGTHPVQVINEVNAAAHVAEVEAEPQRRAFTREELQALFDHADEEIARKRAAGRKGWLAAFRDVTTFKTAYGFGLRRNETRMLDVVDFGRNPHGREFGEYGVCYVRHGKAKKGSPPKRRSVLCVWEWVAEVLEQWVTEVQPLLGREDNPALWPSERAPRIANKQLNRRLAAYRDELGMDPALDFHSLRRAYVTHLIEDGFDARFVQEQVGHEHASTTSIYTCVSSDYRTRTLRRALDATIDEALGPGGKGA

SEQ ID NO: 4713 - protein, 113 aa, synthetic construct
  REGION 1..113: note = TnsF-Tn7 System Protein
MTMQKREVSYTWRLRETMAEHGMYATTDLVEPLRERGIHLSVSQVHRLVTGTPERLSLKVLSALCDIFATEPGELVSTRAANIGIRKTATDDAPAPPNVAELRPKRARITPAE

SEQ ID NO: 4714 - protein, 454 aa, synthetic construct
  REGION 1..454: note = TnsF-Tn7 System Protein
MEPCPRCGQRRVLRPEQNLCGMCVRRARPRKEPTPRNCDQCGRLAKHAAHRLCTACYQRTHNSLIDRTAAALIRLGASIPDWFEPLVEDIGDRFVSAVAVRHLRQIEHHLIQGACTPEALVRALRSPGRSPGDTTRIVNEYFDTNGLGSFLQDEEDRRSAGRRERRVARAPLPFRPAVAAFSDYLLRSRARANLVGGRGLKDATIEARLADVAALANFLERRGINDWAAVTAGDIEEFLGSRSRHRLASFRMFSTFARKKKLILINPALGLTRPRPTGFAGRTLNSTEQRRLIHRWRLTTIDPRERVVGLFALLHGMTSSQIRTVLISDINTKAGTIVIAGRPYHVPLDPITLAAIDAVLTTRLTLRTNNPHLILTKDSRAHETAASPYFMTHILDPAGVTLAVLRQTRLADLAHSHDPRLVAAAFGMTAGGALHYVFDAVDREEEVFASTHED

SEQ ID NO: 4715 - protein, 143 aa, synthetic construct
  REGION 1..143: note = TnsF-Tn7 System Protein
MRLGKAAKGSGPRPRWVPMLDDLGLILHWYLDEVRPKFRGNSPALFCDEGGRFMNSGSIRNRLATLCRAEGRPVHEQFSPHSLRHACATRNYERGVDLVAIQQMLGHWNVGATMRYVTPSSTFVEDAYRRGITTTLAEATKEE

SEQ ID NO: 4716 - protein, 411 aa, synthetic construct
  REGION 1..411: note = TnsF-Tn7 System Protein
MDDWAKIRQLFSTGQHSKREIGRLVGVSRGTVDRALEADRLPTYQRASTGSSFDAYAAQVRVLLAVTPRMPASTLAERVGWLGSASVFRDKVAAIRPEYVPPDPADRLVHEPGRQVQCDLWFPHDPLPLGHGQEGMPPVLVMTSTFSGFFQALMLPSRTTPDLLGGMWSLLQAAPAVPPRLTWDNETGIGKGKLTERTAAFAGTLGTEIKLLKARDPESKGMVERRNRFFRSSFMPGRHFASPQDFNEQITDWLPLANARHSRSRRARPIDLIEQDRAAMRPLSPVPPDVLFRNTVRLPRDYYVRVLSNDYSVAPAMIGRLVDVTASLDTVNVTHNGVNVTSHEREWARALTVTDPEHVAQADVLRRQFQSLRHRRPQPVVAFVETASLASYDALFGVDTGPELRDLDVVA

SEQ ID NO: 4717 - protein, 112 aa, synthetic construct
  REGION 1..112: note = TnsF-Tn7 System Protein
MAEFRWRLRMAAAQREVWTGAQLRRLLADKAGLELSSASISALMTQQPSQIKLATLAALCQALDCTANDLLELDTTTSSTNSAPSTPALQEPLRAASGQKQPRASRNTPPPF

SEQ ID NO: 4718 - protein, 225 aa, synthetic construct
  REGION 1..225: note = TnsF-Tn7 System Protein
MSGTAASQIEYYARALRAPRIGDAFRRLGDQARDAGWSHEEYLAAVLSREVSEREASGAALRIKAARFPGYKTLEDFNFDHQPTADRNLLAHLGTSTFVTEAKNVVLLGPPGTGKTHLAVALGVQAAKHGHRVLFDTATGWVARLQEAHSRGKLAAELTKLRRYSVLVCDEVGYIPFDQDAANLFFHLVASRYEHASLILTSNLAFGKPHTFHPTYASWYLIFMG

SEQ ID NO: 4719 - protein, 225 aa, synthetic construct; identical to SEQ ID NO: 4718
  REGION 1..225: note = TnsF-Tn7 System Protein

SEQ ID NO: 4720 - protein, 474 aa, synthetic construct
  REGION 1..474: note = TnsF-Tn7 System Protein
MTSIEKTKHRCNSCGNKNVKIKRRYKDDTYCANCYRIWFVKKPCSQCGEINRLHKKEDFAVCRSCRMSQPCIRCGGAAVKDGANTEYGRVCQTCYQNYFKVKKECFECGEFKRNISRYSKLSHDYAVCTSCYQSHFMQSCSLCGRYRELVDTKQGKICQKCHEFGEIPCESCHKLMPAGMGKRCNDCYWSQRLKHEAKINTYLLSSTLMKQAYTDFSEWFMVNKGSMTAALKHNNFIDFFVRCDELWGNIPNYESLVQEFKPNGLREYLTVLRWLIKTKQVVVDLKIKDQIAEDERIANLLAKFDDNAPDCISTYHQYLDQKLLNGKTSLKSVRLALQPAIDLCTKYDIKGSHTPSQEQLDGYLLVKHGQYNALYGFIAFLNKSYGLNLACNKPSKDDVQKLKKKEIEKKMMVLYDQPKPLSDKDELMWIQMSMSYFHQVDIQVKTLRTLPTEPCDEDVFKIVFNQKEYWLPKI

SEQ ID NO: 4721 - protein, 216 aa, synthetic construct
  REGION 1..216: note = TnsF-Tn7 System Protein
MFKHQARKIKPTRRSVSGVISYKKKPLAYESTLERDFIIYHAFREDVKNITPQPVKIPFNKNGRTYRYTPDYYVELDAKSGKSFIAEVKPKQEWQLNWRDWSDKWKAAKRYCKEKGIRFIIFDEDRVRHEALDNINFLRTYETIRVNNEEVEVILTDIKQRGITSVDYILERYFKSKLYRPDGQALVWHLMASKQIGFDIWDDVKDPQMEVWHVGH

SEQ ID NO: 4722 - protein, 659 aa, synthetic construct
  REGION 1..659: note = TnsF-Tn7 System Protein
MSSHFDTSSKYRRDHIQMVLGGIYRNKTDDEYQLIEYLDDLNQAVFKNLKTLSNHVLSIHDFDNVIDGANTSVVIDLNDIGDDEWQEAQKKYLAITPLIMEEDWYGEDNYRGEQGYERRAKEVGVSSRTLRRWVDAYQSTGSIGSLIDQKRGWKKGTKRLNEETENLINEVINNFYLTVQRPNVQATIREIHRRCYVEDIEKPSKNTIRNRIKEIKEKDLLRGRGQRKRAKQKFTAKAGHFPDAKYPLSVIQIDHTPVDLILVDDKHRRPIGRPFITVAIDVYSRMVTGYYISLDAPSVTSVSMCISRSILPKDELLLEFGLSDVKWNVFGIPKKIHVDNGSDFRAESLQKSCAFHGINLEFRPLARPEYGGHIERFIGTIMKRVHELPGTTFSNIKEKDEYNSEKHASLTLHEFEKWFLTYITMDYHESIHSGIKRSPKEQWRIGIFGEGFESGIGLPPIPSDRHTLVLDFMPSALRTIQRNGTTIGGLQYYDACLNNFINHTDDNGNKTKFIFRQDPRDITRIWFYDPELLQYFPVPLANQVLPPISLWEYRKVYKQVKQDSGIVNEALIYQALQDIHTLVEESQNTTKKVLRSEQRKKSHTKSQTMYGKLKSDESEEVDILDTLPESTRVLNKKAVETSLDGSNDNDDDLYFEDID

SEQ ID NO: 4723 - protein, 362 aa, synthetic construct
  REGION 1..362: note = TnsF-Tn7 System Protein
MKKSRFTDTQIVNILKQAEQGVPVSDILREHNISQSTFYKWRSKYGGMDASLITRLKELEAENARLKKMYAEERLKSDILQDAMFKKVVAPSRRKELAQHYIKARGISIRLACLIFNISITCYYYQPKTADETDQIAKLLTDLTSSHKNWGFKLCFLYLRNVLGLPYNHKRVYRIYRELELNLRIKPKRRIKRDKPQKLAVPTCINQSWSMDFMHDALTDGRAIRLFNVIDDHNREALTIEVDFSLPAQRVIRSLNQLIEYRGKPDQIRCDNGPEYISNDLKDWATKQDIVIEYIEPGNPQQNAYVERFNKTVRYDWLNQELFDNLDQVRQQAEVWLDHYNNERPNMGNGGFTPIQKLNMAA

SEQ ID NO: 4724 - protein, 385 aa, synthetic construct
  REGION 1..385: note = TnsF-Tn7 System Protein
MSKTDQRATQNYWVKPLTFATPFLYGESLTSWLVRAALRHGCSPLTFTYYYWPKYRIWTYDVDKGFDHIDGQIRSDIATLAGHNIDTFDDQILIDFLDDTPVKSDNKKPLLWTAPLSKRNRYSRVGYPFCPDCMSDDKEAYLKLQWRFTWSVCCTKHKTFLQVDCGYCNQPYQPQLLSPEQQFINRCHSCLYKIDKAISDITPSAALIDFQLLADQAFFSKQGIVLGQVVSMAQWFEYLLFLINLVRRGLHNPNYMFGKLLTVLEIDTSVLSLPKTALRFDYLPIEERVLLLECAYHLLQVDSDEWIKACLALNITQNSFQWSKYTVIPKAFSEVCDQLHRVPTRQHKAQSEDIQPASPKAVMTAWNRLKRKMQMRESYDKHRED

SEQ ID NO: 4725 - protein, 474 aa, synthetic construct; identical to SEQ ID NO: 4720
  REGION 1..474: note = TnsF-Tn7 System Protein

SEQ ID NO: 4726 - protein, 297 aa, synthetic construct
  REGION 1..297: note = TnsF-Tn7 System Protein
MNESSYTHIHEKFRHIAHLPDKERIEFIHSPRWVGYNTANQVIDVMQGLMNHVKQHRMPNLLLIGDSNNGKTTIINRFYDKFGENYTVDETLVIPIVKIQAPPTASEKDLYISIIEAFKLPYRPTDAANKLRYQVVNAFRHTNVKILIIDEVHSMLTGTARQQRAIMNVIKFLCNELLMPIVLCGTKDAVRILHTDPQHASRFDVAELSLWSNDKEFKRLVGSFEKILPLKKPSKLIETEKVNLIYSISTGNLGDVKRLINDCAISAIESGEEEITVESIRGKSCLKPTKGLRRIIG

SEQ ID NO: 4727 - protein, 297 aa, synthetic construct; identical to SEQ ID NO: 4726
  REGION 1..297: note = TnsF-Tn7 System Protein

SEQ ID NO: 4728 - protein, 840 aa, synthetic construct
  REGION 1..840: note = TnsF-Tn7 System Protein
MISSATSDAPRFLTEPRAVILEVLIATEPDLPLNLLEHSVDQIADTRAKLRRLAQALTAAPDLLTTGRPEGPRLIELLIRALQPHGASRLVLPRCARCGKDHPLRRVEGNKRFCAHCGDPRRALNRLPCAVCGKTLRVVAWDQDGRPRCQQHLPAEDGAEAIIAVLQTLNTGLDDQELARAVEISAPQPFQRRKVADELTRRPELLSGQGAYGSTRVIALIETLIENGARGIALPACPFCRRTVALRFRRNDARCCRRCYDETLLLPCSRCHQPSGTAVRTPQGEPLCSRCMRRDPVNHETCAGCGRLALLTRGEDGALCKRCWRPPLATCSSCGDYKPCHHADTDSPRCPTCTARLNKEPCIRCGTIRHVWVRADDGSALCETCARRKEPCLTCGHVRRVHGRTLDGPLCKSCYANDPVSFSDCVECGVVERLHHYGLCAQCAATRQLRGSLADPTGSMRLHLEPVVSTLTRSEPSSLLLWLGRPGPRRLLSDLASGSGPVTHETLDNMPPSKAVRFLRAALVANGVLPERDEFLIRFEQWLEETLQRIEVPEEQRDLRNFSVWFHMRRLRRRAAWRPLNHNQIVTVQSDIKAAIRLLSWLREQGTSLSACTQRDIDEWLVSNETIALGARNFLVWSLARGHAHGVVIPTRRSTRGQQSLPEPDQRWSLSRRLLHDTELSTVDRVAGCLVLLYGQPCTRITNLTTAQVTDTGKMLHLILGTRPVEIPEPLSTLIRDLVRTRKGYAAVGHTDAHPWLFPGGFPGRPMSPEHLKKRLNRLGIPTRAGRNTALMELAGQLPAVVLSRLLGLHINTATLWSQDAGNTRPGYAAEVARRALRKD

SEQ ID NO: 4729 - protein, 840 aa, synthetic construct; identical to SEQ ID NO: 4728
  REGION 1..840: note = TnsF-Tn7 System Protein

SEQ ID NO: 4730 - protein, 342 aa, synthetic construct
  REGION 1..342: note = TnsF-Tn7 System Protein
MGCIQCNSPGFPCVVVLIGPAGSGKSTLASTWEPTQVLGLDHYRALVSDSAGDQSATGDAVFALLRVLEARLRRGLTSVIDATSTNPDDRATLLATARRYGVPTAAVIVPTPLDVCLERNAARTGDRHVPEDTVRAQHQAMVATASPARLRHEGFDYAEFAPSLQRLNRLGVLLRRVSDARRRELGLDGGDGVDNDERLLRRFFGPEIARLATWKDGSGLVTGEDRVVVLEVAGDYRTLAFRRDADGEGNYGFDILVPCPTDAVDEDERCGGPAWLPAYSATDLLRAYEGQHEIGDGLVCEGCGYESEIDHETADWEAGADQGDDPEGRADLQAQYAEAVRP

SEQ ID NO: 4731 - protein, 342 aa, synthetic construct; identical to SEQ ID NO: 4730
  REGION 1..342: note = TnsF-Tn7 System Protein

SEQ ID NO: 4732 - protein, 359 aa, synthetic construct
  REGION 1..359: note = TnsF-Tn7 System Protein
MELVDGVFLLHAEDAVLDGMLVGWEKQQRGRRLDPETIEERRRLVRRFVDFSGEYPWNWTAAHMDEWSFSLIAEQGRARSTIRSYQGAIRLFCDFITSPHYGWAEECIKRFGTHPIQICHEWNTAAHLEDYEGDVERRPLTREECQALFDYADDQVEKAIRLGRKGALTAYRDATVFKTIYGWGLRAREVSRLDLTDFYRNAKAPELGKFGMMNVRWGKATKGSGPRRRMVASVMPWAVESLEDYLLNIRPRFRHHAGSKAVWLTERGGRLQPREIETRFAAYRDALGFDKELVPHCLRHSHVTHQIEDGVDPKFVQEQVGHRFASTTAIYTGVSTDFMNTMMRNALDRAFAAEELETV

SEQ ID NO: 4733 - protein, 114 aa, synthetic construct
  REGION 1..114: note = TnsF-Tn7 System Protein
MTAKLDYQWHLRELMATRGMFSTTDLRPLLAERGISLSASQVFRLVTEKPERLSMKTLMALLDILGCRMDELIEPVRATGQQRKAASGETTATAAAEVPEPGVGSFRPKRARIL

SEQ ID NO: 4734 - protein, 763 aa, synthetic construct
  REGION 1..763: note = TnsF-Tn7 System Protein
MTKEALVGAMRQRVLDRLSACLPGLAQVDAVRLVAAANADKRRGLRELDAFLQRGLDVLVSASSDTPPGAFRLLVLLEGEGHPVRVPVCAECGLRRTHLPGRGGRGRVCQSCVAKARARPCARCGQTRPVAVIEPEGPLCHPCRDRDPRRHEPCSRCGRARRVNGRLADGSPLCSTCHGKPVHICAECGRVDKVARRGPDGPLCPPCYERGGRQPRRCGHCGRTGRISVRGRDGGPDLCRRCNRQPVVECAGCKRLRPCAFAATARPLCVSCRPRRATPCARCGTSCQPAARWPIGGVCRHCYRHARANPSPCPSCGKVRVLVAADFRGRDVCGPCAGTTIDYTCRTCGQAEERYRHGECVRCVARSKLEDQFRRPDGSVPAELTPLLAALAAAHRPRSVLAWVERGDGSAALLRDLLRSGCAITHEALDAATRQQAAAALREMLVHAGVLPRRDEQLERLAPWLSRTLSTAPAHHRQVLRAYGNWSVLRRARLRADRTRFTAASARNARLKVSTALTFLRWLDTTDLTLKRARQAHVDTWIEDGGLNRRLLGGFLTWASRRGLAQKLSVAAITPSGPDLSMTEDQRWALLDRLLHDTTISVDVRTAASLLLIYGLPVTFIATLTTDNVTTSSGKHFLQVKEHRTQLPPAVAALITQAASAARTSSLVGRAVPGTPWLFPGRLAGRPISAAALCQRLRQHGIRIRRARNSALISLAEDLPAPVLSKILGISITAAIRWTRYARRDWLGFVGERAASAASRSQR

SEQ ID NO: 4735 - protein, 763 aa, synthetic construct; identical to SEQ ID NO: 4734
  REGION 1..763: note = TnsF-Tn7 System Protein

SEQ ID NO: 4736 - protein, 910 aa, synthetic construct
  REGION 1..910: note = TnsF-Tn7 System Protein
MADFPTVTSAFQQPPGNLLPVIPAEVYRTRRVVLFGPPGIGKTTAAGVLGQQLNLPVVRLAPGPQDSRIPHAALLELALALQPQPGAQKLAAGLDDAAEPGSVDHTKTALRLRRLTAALLRDTPPLTLLVDNAQWLDPASAAILRWALRMAPNLPVIAAERTWHPGAAGHWCGEDPCTVRIPAMTAEQIAALLSPYRLSANQVTQAHTRSGGNPALALALAGAHDRTANMSATRGPEGDPLLPSAARRLVGEWLGTVSADVQHLLTFAALDDQPDLVLLSRLAGPAAESLLAEAEAAGLIDIGQPDGKIRFTAAAIGAELAARPPAAARRLLHTRLAEASHDSVRRDRHTTLAADTTDPQSAYHAARAAARARLRGQHALAAELSLLAAERTPHADTDLLTERALTAVRDAAHCGDLLRGQIAVRLVLHHDSSPAQRVNALITLIDSGGQHLHSADELFADALHEAADQPDLTAQILIRQAIWANVNEGNPGRACALAAQAASLARTAGDTATTAMALTMQARVQRILGHPEAQTTLRHALSLPRSTHIPVNATPEQLSARHALFDDHLDEARNALLPLLVEAERSGDAEGTVDILRSLAEVEIRAGRCARALNYADRAQSLTDGAGLDPGPACYTSALVEGIASHTDSALAHARRGADTARREDNKVFLSRNLFALGHLLLVTGHPKEALQALEEVRTLETRQQVRDPSVLRWHADLAEALICLGHLDQARDLLTETRRTATDLGRSSVLPALERSQALLDATLGDYNAAAQRLTDAADHLHHLPIERGRTLLALSHTERRGRRRASARTAAQSAAELFNTHQAHPWNEAAIRTLHRLDPARTHRDTLPRLTTAEQRCAELAASGASNRDIATALTISVKTVEANLTRVYRKLGLHSRIQLAHAVIPGT

SEQ ID NO: 4737 - protein, 910 aa, synthetic construct; identical to SEQ ID NO: 4736
  REGION 1..910: note = TnsF-Tn7 System Protein

SEQ ID NO: 4738 - protein, 377 aa, synthetic construct
  REGION 1..377: note = TnsF-Tn7 System Protein
MFNAIMQELAASIVAPNLLPSSGVVFLDPAPATLEAMLEGWSRQQRVRFLKAETIRRRVDLVRRLSRFANQYPWEWSASEVEAFVDHLRGGPKPIVYSTARAYLNGIQLFLEYVTDPRYEWQQLCEERFGRAPQQVLGEWNTIAHVSEYEGRPGRRPLTYDEVQALFDAADGRVEVIRSRGRKGGLAAQRDSAMLKAVYAFGLRRREAWGLDLADLRRNPRVPDFGEFGAVLVRWGKSSRGSPPKRRTVLLVPEMDWIVAVLRQWLDEVRPRFQPAGLAALWVNERHERVSWRSLNDAFVAAREAAGLDPVLDLHCLRHSYVTHLIEFGYPERFVQEQVGHAYASTTALYTGVSDEYRNRLLTRALQARGPNLWEAL

SEQ ID NO: 4739 - protein, 108 aa, synthetic construct
  REGION 1..108: note = TnsF-Tn7 System Protein
MTGGFAISWHLRLRMAEKGMYATTELVPLLAERGVDLSREQVFRLVTQPPQRLSMDTLAALCDILGCTPNDLIEVQPVQAAVRKAVGEVDRSGPPPVRRTAIRRPAAE

SEQ ID NO: 4740 - protein, 335 aa, synthetic construct
  REGION 1..335: note = TnsF-Tn7 System Protein
MRGSANFRPDAWDRVRAHVVRALGDLSLADADRLLKAARVDRPKTLNQVDAYLAAHGDGVLNPDASCPRGLMRLTHVLVADGHASVKPPACTNCQQRVSLTAIGPTGRICGRCRDLDRSFTCARCAKTSVSRRVNLPDGPVCTNCYSRDPLSRKECSICGRLRPRARRLVDGGVLCPTCAPPRLYTCSGCGQRRRAPYVASEGRICTNCYAKASTVWVCGLCGATRRRQSSSVLGPHLCGTCRAITTRTYSGIRSPHSKSTCAFCRQRRVVARHWPAGPVCTPCVRKAKMYPSPCAACGQQAVLIGFDPDERQICGPCSGSTLDYRCANCGQPGI

SEQ ID NO: 4741 - protein, 245 aa, synthetic construct
  REGION 1..245: note = TnsF-Tn7 System Protein
MCVALEFLAWLETRGRTLATMDQADIDNWLAHGTWRHREIRPFLHWTTQRRITHGASAPANRPSPPSVFIDEATHLEQLRRCLNDNTIDIDVRASGALILLYGITTMRVLGLRQNQIHTQDGHTYLTLRDHEMVLPPKLAQLLAQLPRPTRRSTLPEPSTPDRLLFPGRTPDRPVNSGVFGKRLKHSGLTIRGGRNTGLITMAAELPGAVLADLLAIDIVTATRWAAYAKRDWNQYLATRKAGST

SEQ ID NO: 4742 - protein, 250 aa, synthetic construct
  REGION 1..250: note = TnsF-Tn7 System Protein
MATTLADPDADLRAWLRAYATKHPCHGFRRAWAALRHDEGRVINVKKVHRLWCAEGLQRRVHSPRKRAGTSSAPPEVIADAPKVVWAMDFQFDSTTDGKAVKIASMVDEHTRESLLHLVERSITAERLVAELEKVFATAGGPPKVLRMDNGPELVSQALQRFCENKVGMSYIPPGTPWNNGYIESFNNRLRKECLNRNHWSTLFEARVVIGDFKHEHNTRHRHSALGYRTPAEYAAACTHDHYAMACEIN

SEQ ID NO: 4743 - protein, 176 aa, synthetic construct
  REGION 1..176: note = TnsF-Tn7 System Protein
MLSIHQRPFAPADRSQPGHWEGDLIVGKNQRSAIGTLVERQTRLIRLMHLPTRDADSLRIAIATTMGGLPSNLIRSITWDQGIEMARHTDITADLGVPVYFCDSRSPWQRGSNENANGLLRQYFPKGTSLSTYTPDHLRAVEYEINNRPRHTLEDRSPAELFTALLTSPDHQLLRR

SEQ ID NO: 4744 - protein, 300 aa, synthetic construct
  REGION 1..300: note = TnsF-Tn7 System Protein
MLTEHGVTIAPRTFYAWLTRPPSARALWDTVITEVLAGYYEPDQHGRRKPESLYGATKMWAHLQRQGIAVARCTVERLMRAHGWRGVTRCKKVRTTVADPAAARAADLVNRQFRVPAPNVLLVADFTYVRLSGGAFVYTAFAIDAYAGRIVGWTCSASKQDRFVRQAIRHAAQLRVNEGNPLLGNTIHHSDAGSQYTSVRFGETLALSGLVPSIGTVGDAFDNALAETTIGLYKTEAVRDDSPFRRGPLHRLTDVELLTAEWVHWYNTDRLMHRLGRIPPIDYEAIHYATNTAQSEAAHQ

SEQ ID NO: 4745 - protein, 335 aa, synthetic construct; identical to SEQ ID NO: 4740
  REGION 1..335: note = TnsF-Tn7 System Protein

SEQ ID NO: 4746 - protein, 108 aa, synthetic construct
  REGION 1..108: note = TnsF-Tn7 System Protein
MIKKMGYQWRLRALMAQRELYQTTDLVPLLAERGVVLSREQVFRLVTAPPQRLSMDVLAALCDILECSPNDLIEIEAVNQSVKKAAGDSPREVPKVRRTTVRRPDRSS

SEQ ID NO: 4747 - protein, 546 aa, synthetic construct
  REGION 1..546: note = TnsF-Tn7 System Protein
MVGVKQSDCIGCGAPVGFIDRQYCCRCTARQKEAAARAICPRCGQQRVLQGDTGRCITCSRVCTACGHPVRDKTATLCRDCSRKTERDTAKAPCSRCNRPGYLRKDTGWCGHCSRPRQTKQPPRPCRECGRMRRHAGLGLCSACWQRHPDRPFVRTESLIAELGQPPDWLRDFAADLAGKYCVSRACTMITSLGRLLRDDHPNHPQALLERSRRSGRSMGSLARALEAFFTGHGMAMATDQAERLAAGRRQRRIDAVPETLRPSVDAFAGFMMRSRERARRAGTRPRSDATLEAALAIMRDLARFLASERGKQDWALTDVHDVEAFLAGSPKARKRRLVVLGQFFRFARSQKIVLIDPSRGLTARGPNGFTGATLTLDQQRVLFRRWTTDPAIHPHEALLGMLALLHGASSREVKMLQTADLDPHARTTRLGDRPHSVPLDPASWAGLERCLAHREAQRTDNPHVVVTRQTKSGRGPASTAYVSHILDACDFPPRMIRCTRLLDLVNTMDPKLVAAAFGMDPEATMIYLSDHVDAERLPDQQDRTR

SEQ ID NO: 4748 - protein, 354 aa, synthetic construct
  REGION 1..354: note = TnsF-Tn7 System Protein
MTSQLRVIEGGAVLLEPVTADPWEFQAECVEAFVASWRARGLSPVTVENDIGLLERTLNALGRPAWDVTPEDIDRVVGDLALAGRAASTRREYVQIFKGFHRFLQVRKAVEIEAGFGVRLVCPVDEFNASRHVGDDSPAQLPPPTPERVAEFFDFLKARIATARKYGPAARDYAMFRTLYHAGLRSEEASLLERPDAHFSRGPFGKLHVRFGKGARTSGPRPRWVPMLDGLDLVVHWFLDDVRGKFPDSPVLFADESGGSLHRGTIRNRLRYLMELEGRPAADRFSPHALRRACATHNYERGVDLVAIQQLLGHWTVSSTMRYVRPSATFIEDAYRRAVTTTLGELTAEEGSPA

SEQ ID NO: 4749 - protein, 104 aa, synthetic construct
  REGION 1..104: note = TnsF-Tn7 System Protein
MKIRWRLRMAAAQREVWTGTQLQRLLAERAGLQLSSASVSALFTKEPSQVKMSTLIALCTALECTPNDLFEVDTTPVERPAAPPRPVADLPKAASARGRSMPPL

SEQ ID NO: 4750 - protein, 256 aa, synthetic construct
  REGION 1..256: note = TnsF-Tn7 System Protein
MGAQHHRGLSEQAADTAIDQACRMLRLPTIRSQFSDLADAASREQMSYKGFLAELLLAECDDRARRRSERRIKAAAFPREQSLRAFDFDANLNVDAATINTLATCEWVRKGQPLCLIGDSGTGKSHLLIALGTEAAMKGYRVRYTLATKLVNEFVEAADERLLTKTIARYGRVDLLCIDELGSMELDRRGAELLFQVLTERGEKNSVAIASNESFGKAHMFRRTRARQRQNIMGSLGVRSRLRPGNRDTRRRRCPG

SEQ ID NO: 4751 - protein, 256 aa, synthetic construct; identical to SEQ ID NO: 4750
  REGION 1..256: note = TnsF-Tn7 System Protein

SEQ ID NO: 4752 - protein, 460 aa, synthetic construct
  REGION 1..460: note = TnsF-Tn7 System Protein
MRTRGTCPSCGHDGVLPGRRNRTDTTPVCLICAGIPGEYRCKTCGHEGEIYRAGECARCTLRDDLCRILLHHPADHAAMQKLIDVLCAVDRPESILSWKRNIQVLQLLNGITSGAIPLTHDGLTAAGTGRHVSHLRSILQHHGLLPERDEHLARFEIWLAVKLDSITSPAVRAPVEQFATWHHLRRLRNNSIPGQASDGPKRSAQQEITETIKFLAWLHETYGRTAAQCTQQDVDEYLASGPTTRHLIRTFFVWAKKSKINVEVTIGFRQAKTSPTLTQEQRLAWLKELLTGDAESLPYRVAGVLLLLYAQPLTKIASRQLADVNHIDGETRITLGKEPIPVPEPFASQLNYHLRHRPNLRTAGGTGDTRWLFPSNHAGQHLNPQSIMLRLRSLGVNLQGARNAALRELVTEVPAPLVAEMLGYSYQVAHKHAEAAGNAWSRYVRPAPRKPNAVSQLGLW

SEQ ID NO: 4753 - protein, 460 aa, synthetic construct; identical to SEQ ID NO: 4752
  REGION 1..460: note = TnsF-Tn7 System Protein

SEQ ID NO: 4754 - protein, 246 aa, synthetic construct
  REGION 1..246: note = TnsF-Tn7 System Protein
MLTSVVSAGPVGAGVVDLEFDTRAGRLCLALDRCTTFSFEHDCLPVREFPSYRGQRNFPGLWWFSRTGVHVGHESWLERDQLMALDADPDVVGVVSQPFWFRWSDGVSHAPDYFVRRRDGSALVMDVRDDDRITAADQEKFDRSAAECAAVGWDYRRVGVLDPVLQANLRWLSGYRHPRVFRPGLADDLMSAFDPARPLITGVLAVGTPLVVLPVLFHLLWQRKLSADLAATTLTDDTIVSPSAGW

SEQ ID NO: 4755 - protein, 290 aa, synthetic construct
  REGION 1..290: note = TnsF-Tn7 System Protein
MAPTRAFPEGPQRPLPKTVAPFRNETVLSYVARLAHANHLATAQLRRYVAGTAHSHPRPEWLAVAAGYPEQVLRARLRDFPANERNYLNQTTSFRPLCRLCMARRGIHEPVYCTLGPHITVCQRHQLWIGPLAHSLNDQRSLRHQPRVLAAARVHTRLVHRNGDPDILFILRQARHFLSYWANAEQSATNPFEETTLSANIAVYPDLIAIGVTLATYRQQIREQITNRRLAWPLVLLEKINEHTEHTHTDITPIEQWVHNQRLTAAMHSEVTEARVHAYRRASRGGWPVR

SEQ ID NO: 4756 - protein, 344 aa, synthetic construct; identical to SEQ ID NO: 4080
  REGION 1..344: note = TnsF-Tn7 System Protein

SEQ ID NO: 4757 - protein, 344 aa, synthetic construct; identical to SEQ ID NO: 4080
  REGION 1..344: note = TnsF-Tn7 System Protein

SEQ ID NO: 4758 - protein, 364 aa, synthetic construct
  REGION 1..364: note = TnsF-Tn7 System Protein
MPVDKSGRVYVIGSVPLLHPEVQTVDDMLDGWRNQQLCRNLAHDTIEARIATVRRFIGQTNEFPWSWSSSLVEEFFADLRGIKGRKQSTVRGYQNTLRLFCSYIADPDYGWDRVCEDRFGTHPSQVFFEWNTAAHVQDNEQAPEKPKRELQDFFDYADDQVTVIANSKKKGWLPAYRDSVMFKIAYSFGLRFNELRHLQTVDFSRNPHAREFGRYGAVKVRYGKAKKGSPPKRRTVLTVFEWTPEVIEDWLSHGQPYMDDGMDLFPSERGCLVAENTLLRRFRRYCNDLGYSNGLDLHSFRRSYITHLIEDGWDAKFVQDQAGHDYASTTSLYTGVSSDFRTRTLRRVLDQTIKDALSFGEETS

SEQ ID NO: 4759 - protein, 114 aa, synthetic construct
  REGION 1..114: note = TnsF-Tn7 System Protein
MNREVDYSWRLAELMAAQGMHNSTELIPRLSERGIQLSRPQVYRVVHQRPERVSLQLMAALCDILGCGVEDLVTVTANDARKRKTATGTATPPNVVELNKSIRPRRARIIADDD

SEQ ID NO: 4760 - protein, 473 aa, synthetic construct
  REGION 1..473: note = TnsF-Tn7 System Protein
MVPRVKYSFPEGRICGRCFDTATHTHGLCPACGVDRLLPGLNSQGAPICADCAEIRTSFRCTVCGQEGALKRAGQCETCVNRSDLNAYLRLDAPDADPRLVRLRERLLGADRPASIYQWLRLKKPRALLEALGAGTVSIGHDALDALAQDATVRHLRALLVDVDALPRRDEPLAQFEMWIREKAALVVDESARDTVERFASWHHLRRLRTQSTRTDSHRGVHNAKQEITVAVDFANWLAERSTTLADCRQSDIDVWLVTGNTTRYTIRSFLQFTARSRATAPLDVPRRAVRATRRMTQDDRLDAIRRFLQDDAIRTADRVAMLLLLVFGQPIARIVEFPKEVIQTQPDGRLVLVVAADAAPIPEPFAGLVRDHLASRSRDRTGNITGNPFLFPGTRAGSHMTQNHLHAVVTGLGVNVLAAKNGALDDLVAAMPAPLVADTLGFSYTAIGQHERYRGSQYERYVHARGALRRRH

SEQ ID NO: 4761 - protein, 774 aa, synthetic construct
  REGION 1..774: note = TnsF-Tn7 System Protein
MRVRGARANNLRDVDVDLPKRRLTVFTGVSGSGKSSLVFGTVAAESQRMINETYSAFVQGFMPSLARPDVDLLDGLTTAIVVDQERIGADPRSTVGTATDANAMLRVLFSRLGQPHIGGPNAFSFNLATVTAGGAITVQKGADAKAQKVSFTRLGGMCADCEGRGLVNDIDLTQLFDDTKSLGDGALTIPGYGTDGWNVRLYAESGYFDRDTPIRDFTEQERQDFLYREPTKQKIAGINMTYEGLVHRVRRSFLQKDREAMQPHIRAFVDRAVTFTTCPACDGTRLNDTARSSKIAGRSIADVCAMQITDAVAWLQGLDDPGVGPLLEGLRDLLESFVEIGLGYLSLDRPTGTLSGGEGQRVKMVKHLGSSLSDVTYVFDEPSTGLHPHDIERMNELLVRLRDKGNTVLVVEHKPEVIAIADHVVDLGPGAGSGGGTLCYQGSVDGLRASGTVTGQHLDDRVTVKSEVRRPDGAIAIRGASAHNLHDVDVDVPTGVLTVVTGVAGSGKSTLIHGSLARRDDVVAIDQSGIRGSRRSNPATYTGLLEPIRKAFAKANGVKPALFSANSEGACPACNGAGVVYTDLGMMAGVASPCVECDGKRFDQSVLGYHLGGKDISEVLGMSVADALAFFAAGESALPAAHTILARLADVGLGYLTIGQPLTTLSGGERQRLKLATHLGDQGGVVVLDEPTAGLHLADVEQLLGLLDRLVDAGRTVVVIEHHQAVMAHADWIIDLGPGAGHDGGRIVFEGTPAALVAARSTLTGQHLAAYVGA

SEQ ID NO: 4762 - protein, 774 aa, synthetic construct; identical to SEQ ID NO: 4761
  REGION 1..774: note = TnsF-Tn7 System Protein

SEQ ID NO: 4763 - protein, 368 aa, synthetic construct
  REGION 1..368: note = TnsF-Tn7 System Protein
MAVDDRGLFVIDAHRVPMLRPDAQTFEEMLVGWRNQQLSRNLSLTTADQRESLIRLFVDHAGSYPWDWTIASVDEFFADRRSVHHNVQSTIRGYQNSLKLFCDYVCDPAYGWIDRCLELFGTHPVRVLTDWNAARHVQDVEHGGTRRAFTRGELQALFDFADDETERIARLGRKGWIAAFRDATVLKTAYLFGLRLNEVRHLQVVDFTRNPHAPEFNKYGHLNVRFGKAMKGSGYKQRNVLAVRPWGSEVLADWVERSVHYRGESLDLFPTERRSLVSGATLQARFRRYRSELGLGGELTFHSLRRSYVSHLIEDGFDALFVQQQVGHEYASTTAIYTDVSSDYRTSTLRAVLDGMIEDALHPTAGSS

SEQ ID NO: 4764 - protein, 110 aa, synthetic construct
  REGION 1..110: note = TnsF-Tn7 System Protein
MKRDTDYTWHLAELMARNKMHNSTDLAPHLAERGINLSSAQIWRLVKQRPERISLPVLAAICDVFHCSPAELITVTAEDAALAKVVNARPRQDPASDKVRPRRARVTPDD

SEQ ID NO: 4765 - protein, 687 aa, synthetic construct
  REGION 1..687: note = TnsF-Tn7 System Protein
MTGIDPVLSATTVADVVERVAATPGARARLAGYLLEHPDALTSGHSRPPKVVGAFIAGLVAAGSTVLVVPRCAGCGSAVELPHTRGPDERICGRCWRRNHTAECVDCRRVKPVYSRTDEGRARCAGCDKRARAEPCGTCGRVKSVARRAVDGSARCSGCARRDTSAWEDCAGCGRRRPVNARAEDGGALCVSCYLAPPAVCAACGETKPVASRRGGGPLCAGCYRQPERECGGCGRIRRIAVRGRNGQPDLCGSCHQAPVLVCGVCGVEGPCRTTTIDRSPICFRCQLVRRLDQLLTGPSGQIAGSLVPLRDAILSVDNPRTALDWLRRSPAVEVLTAMAKGHRPLAHATLDDAAGTRRGRAFAIEHLRQLLVTCGALPERDRHLARLEVALQELVEAAHPEDQEPLRTYATWWLLHRLRRKAEQGRPPLSSLPTGSASRLPRPPVSLAWLREQRRTLSGTVQGDLDAWLTIRPQARRRLPGFLRWAQTRGFLAGLDAAYPPASDPLSFVCDDQRWGIARRLLTDDSVETRDRVAALLLVLYAQPAARIVRLTRASIQIEGHDIRLQLGEDRVLLPSPLSELIQRLPEQAPAGMARNLADDDLWLFPGRRPGHPMSPTTMSTRLRNLGIEPRAARNTALLQLGAELPSVVLADLLGVHVNTAERWNAAAGGRWTTYASTRHRHAESR

SEQ ID NO: 4766 - protein, 687 aa, synthetic construct; identical to SEQ ID NO: 4765
  REGION 1..687: note = TnsF-Tn7 System Protein

SEQ ID NO: 4767 - protein, 777 aa, synthetic construct
  REGION 1..777: note = TnsF-Tn7 System Protein
MDELVSAGSASAAVAHASPPRFVARAAALAELTGAVREHAPVVLVAGEAGVGKTRLLREALGEAGTADGTLWMACPPLAEPYTLGPVVDALLATDPGRVGGLPLSDLVGSLRPLFPEWSSVLPPAPEPAADAASARHRVFRALVELLTALGADRLVVDDLQWSDDVTREFLLFVATRTPRAFSLVLAYRSTEVGPDDWVPGFTARLRPGTEVVRLELSPLDPAGTAELASSMLDDQPLSQAFAQHLHEHTGGLPLAIEESVRLMVRRKDLVRRDGAWMRLPLAEIVVPPTLRDTLLEQVTRLDERATVVLRAAAVAAEPLPEPSLRHLSGLAQEDFEAGLAECVDHALLSRGPGRRVSFRHVLAGRAVYEATPELERRRLHRRTGQLLETESPPPLARLAAHFRLAGDDDRWQRYADRAVDVALETGDEATAGALLHQLVQGSTMSAERLCSVVDKVPFGSIPASVHLHDLAAALRRSLAAGEHPPAVEADLRFQLSRVLNELDEFDAALGEVERALPHLERDPATVAVSMLALAWPRGRLPKSTHLRWIERATELARRLPRHRAAPGVHGLRRRTAPPRRGARVGGCRGDPRGGRRQPRASHRDDGPHQHRRRRPPLGTSRGGRRPAGGRAAAGGRARPGAARRAGRVHPGPPRLAHRCLGRSRGEGGRPGRQRRRPTGQPARADDGPGARAARGGRDGGGHADAGGGARQRGRCRGVGDRRRTGGRPRLAPPPGRADGPGPGGDRGAGAAHARHRRLAVGDRRRASPGGGAGGGR

SEQ ID NO: 4768 - protein, 777 aa, synthetic construct; identical to SEQ ID NO: 4767
  REGION 1..777: note = TnsF-Tn7 System Protein

SEQ ID NO: 4769 - protein, 375 aa, synthetic construct
  REGION 1..375: note = TnsF-Tn7 System Protein
MADRSGRRPEGSAALVLSSSVVHLHPEEAVFEAMLAGWTAQQTARLLSVTTIESRVATVRRFAAFTGEYPWRWQPVDVEEWTVSLRRGGARAHSTLRNYQNTIAMFCDYLVDPRYEWAKECLARFGTHPVQICHEWNTAAHVADHEGRPTVRPFTREELQAFFDHADAQVDRAQRLGRKGWTAAFRDAAVFKTIYAFGLRRREAVMLDVTDFHTNPAAAQFGGYGICSVRYGKAMKGSPPRRRSVLTVMGWSVDVLAEYVEEVRPLYGVGQRPMLWPTERGGRVSTDYVNVRFREYRDALGLPAELHPHCLRHSYVTHLIEDGFDPFFVQQQVGHAWGATTALYTGVSSDCKNRALAAALGPAFAQITEPEAESG

SEQ ID NO: 4770 - protein, 102 aa, synthetic construct
  REGION 1..102: note = TnsF-Tn7 System Protein
MSRVREVDYRWHLRQLMATRGLFSTTDLAPLLAERGIELSAAQVYRLVTGTPERLNLHVLVALCDALGCTPGRPGGAGRRRGREASQPPRRRRQGRRPRVCR

SEQ ID NO: 4771 - protein, 835 aa, synthetic construct
  REGION 1..835: note = TnsF-Tn7 System Protein
MADHLPRFATEPERVIVEAVLAADTQLSAADVEAVLVAAVRRRPDRRLLAEALHADPQLLTSTRPEGPRSIEHLIRALIDHGARHLRLPQCGRCRKERPLPARDGTQRICTPCKGRLIALANPCVICGGTNFAVRDRDGRPRCRRHLPEPDRDVFRELSERVAALPIGLTIDTVAEAIREAVPSRHGQLRLLWALEDQPDLLTEHAVTGPPKTLPLVKALVDRGAAELSEPLCPFCKIRPAQSLDRDGVRCCKSCWREARSEPCSACGRTTWVAARTFDGAPLCTSCRGHDTFHHQPCIRCGTSGRPVQRTADGILCRRCCERPTAICSVCGRSRPVHHAQTSTPICGSCSTRAQKPKPCSQCGIERRANYRTPDGQPLCKPCGQPRLPCDSCGNARVVYGRTPDNEPLCEVCWSKHPVARRPCGECGTVEKQFHHSLCAACSARRALRAVLSDENTTMRSDIEPVFHALLHVLPPLAVLRWTRSSTTCRSLLGTLATSSGPVTHALLDRLGPPKTVKAVRAALVAGGALPARDERLADLESWLAKTYLRVANPDDRKALRSFATWYHLRRLRRLPEGQPVTAGRAIAVRHEVRNIVRLMEWLEQQGTALGTCTQDHVDAWLADGPIQRVLVRNFLLWASRRGHAVGLQAPWYRGDFTASVIARDHRWSQVQRLAGDDTLDVVDRAAGLLLLLLAQPPSRISLLRTDQVTDHGDKVTLQLGRTPVDLPPPLDDLLRVLVQRRVGHAAATPVQESNWLFPGGLAGRPMSPEHLAHRLRALGIRPRAARNTALMDLAAELSAVVVSRLLGFHQNTADTWQREASGFGSDYAADLARR

SEQ ID NO: 4772 - protein, 835 aa, synthetic construct; identical to SEQ ID NO: 4771
  REGION 1..835: note = TnsF-Tn7 System Protein

SEQ ID NO: 4773 - protein, 397 aa, synthetic construct
  REGION 1..397: note = TnsF-Tn7 System Protein
MGTARYSGEFKRDAVALVESSGRRVSAVARELGVNPESLRQWVARSRAQAPSGAGGEGPLTPAEREELRRLRGQVRGVGAGEGDPAEGGSVFCQGDGPMTGRWRFISDHRDLYGVQRLCRVLSVSASGFYRWIRATPVRVARKAADEVPAGRIEEIHGESNGAYGVPRITRELRERHGAVNHKRVARLMRERGLAGRRLRRTVRTTIADRTVPPAPDLVGRVFAAPAPDVRWCGDITYLPVGGSWMYLATVIDMHSRRVVGWSLAEHMRAGLVVDAVRSAVAARGGDVRGVLFHSDRGAQYTSAAFAEVCRAYGIRRSMGRVGSSYDNAMAESFFATLKRELLYGSRWLTRPQARMAVFAWMAWYNHRRRHSALGYRSPVDYERQHARPVTNLDLVA

SEQ ID NO: 4774 - protein, 366 aa, synthetic construct
  REGION 1..366: note = TnsF-Tn7 System Protein
MRGLSEGSARLVLLDGVALLHPEDAVFDGMLEGWARQQLGGRRLQPDTVRGRQQLVRRFNKFTNAYPWQWSAADVDEWMTYLIGELRRAESTIRGYQTTLRLFCDYITSPHYQWPQECEARFGTHPVQICHEWNTAAHLVDYEGGPDRRPMTREEIQLFLDYADEQVDRAVRLGRKGALAAYRDATVFKAIYGWGLRCTETSKLDTTDWYRNPKAPELGPFGSLHVRYGKRTKGSPPRRRTVLSVMPWAVEAVEDYVVNVRPRYSAAGRSPALWLTERGGRLQAREIEDRFATYRDALGLDKELVPHCLRHSHVTHQIEDGADPVFVQNQVGHRFASTTALYTGVSGDFMNTMMRTVLDRALRNEQ

SEQ ID NO: 4775 - protein, 115 aa, synthetic construct
  REGION 1..115: note = TnsF-Tn7 System Protein
MTAKLDYRWHLREVMATRGMFSTTDLRPLLAEREIDLSPSQTYRLVVERPERLSLKTLMALLDILGCTMDELIEPVAAAGAGRRKAAAAGSATGGSEGPSGVGEFRPRRARIVSE

SEQ ID NO: 4776 - protein, 718 aa, synthetic construct
  REGION 1..718: note = TnsF-Tn7 System Protein
MAPAITAQHAQHILTDVGSWNGRGARALDRHLAAHPDALTAPDPHAPIGLVRLAYALDAAGHRVTLPGCVRCGKQWPRLIRLAPEGRCCEWCVTREKTAICARCGRRGNPTAVRPEGPICRQCYQVDPERVETCTRCGRSRIPSRRDPEGRPLCGTCARPVHTCGSCGRNAVAKAYDSNGPLCAHCYQRPRRQCGGCGRIAPIALRGRDGAADLCSRCRPEVHHHCVDCTHFRPAKALWPRGPVCARCYRQAVAAPKHCANCGNTRVLTGTNSAGLAICSPCAGRAVDHLCTTCGEAGPQHYVRTCRRCAIRRRLTELLADEHGGVRAQLLPLVDHLAGKERADSTLRWLDRAKPAALLRHLGALAKPISHNDLDDLAPSTALHYLRAVLVHLEILPDRLEPLGRLEPWLDTVLETLPPHQVLLIRPYAQWSVLRRARRRAIRRRYTDHSAASDRNKIRIAIRLLRWLDDQHLTIDNLDQPHLEHWLAGSRDRTCAITGFIIWLSQRGLIDDDITLPAKPATLPTEVLDTANHTDRIRRLLADTTIPVTVRVAGLIVLLYGIPLTRIRLLATDAVTQRGGATFLTFSRNPLQLPPAIAALVTDLLVSAQDTATAAPPGRAPYLFPSPTTPGVPLHAHTLSVYLTKLGIPTRVGRNTALFTLTAELPAPVVADLLGMHINTTTQWADYTRRDWTHYLAARSEPGRNLDHHRQLAFLASS

SEQ ID NO: 4777 - protein, 718 aa, synthetic construct; identical to SEQ ID NO: 4776
  REGION 1..718: note = TnsF-Tn7 System Protein

SEQ ID NO: 4778 - protein, 359 aa, synthetic construct
  REGION 1..359: note = TnsF-Tn7 System Protein
MLADNVVHLDPAPAMAEAMIEGWTRQQRSRFLKEPTIAGRVRMIRRFTEFTNQYPWQWSPAEAEEWISSLRSGERPLALSTVRSYEITIRLFCEYLTDRRYGWTQVCLDRFGRAPELVFHEGNSVLHVADYEGTPRRRPLSYDEVQALFDTLDSRVDTIRASGRKGALAAMRDSALLKFCYAFGLRRAEVCRIDLVDLRRNPQAPQHRQVGSVAVRYGKASKGGPAKRRTVLTVPEFDWIVEVIEQYLSEVRPALAPGAHPALWVTERAGRISPRSVNLAFAGARRECGLDSALDLHCLRHSYVTHLIEFDYPVRFVQEQVGHAHASTTAIYTGVSNEYRNQLLTRALRTRLGELWSEQ

SEQ ID NO: 4779 - protein, 108 aa, synthetic construct
  REGION 1..108: note = TnsF-Tn7 System Protein
MIKKMGYEWHLRHKMAEHDIFHTSDLVPLLAERGITLSREQVYRLVTQPPQRLSMDTLVALCDILDCTPNDLIEPTIVNQSVRKAANAGSSDRPAVRRTTIRRPATEQ

SEQ ID NO: 4780 - protein, 406 aa, synthetic construct
  REGION 1..406: note = TnsF-Tn7 System Protein
MGPDGTISARWAALHAKLAASDTPSATIHWIQATKGSRLLRQLVIDDIPVTHEHLDTLAPSRTVNSVRDLLVRCAVLPERDAEYIDRIDPWLRNLMADAPPHHLHVLGPFARWYLLPKARRAAHRRGVGQSAPTTIPSTVLAASRFLHWLDSQHLALAELSQSHVDEWLDSGRGHYRYLYPFITWTRTHGLIPTGIRAPFPQYPQRLPLLDDDERLHQLRRCLDDEDLPLTLRVAGALTLLYGLPVTTIVRLRHDQVATTTTGTSLKLAEHRLALPPRLATLLERLAAEPPAPHEVPGLRKQTSPLLFPGAAGTRPIAANTLSHRLAGHGLAGLTARNSARLALAARLPASVLAQLTGIEVDTAAEWNHRAGHDWTSYVAARPSLPDDVQTSGEISLRRTASRGAP

SEQ ID NO: 4781 - protein, 406 aa, synthetic construct; identical to SEQ ID NO: 4780
  REGION 1..406: note = TnsF-Tn7 System Protein

SEQ ID NO: 4782 - protein, 375 aa, synthetic construct
  REGION 1..375: note = TnsF-Tn7 System Protein
MQHTGVDDGLAGAARMMLVEGVSFLDPETAVFEAMLEGWARQQRVRFLKPRTIHARLHLVRRFAAASNQYPWQWTAGEVEAFLSQLRSGDRPVRMSTLRAHECVLRLFMQYVTDPRYQWPDVCLQRFGAAPMMVLHEFNSVRHVADVESRPERRALSYDEVQALFDAADGLADQARARGRKGGITALRDSIALKTVYAFGLRRREAWGLDLPDLRHNPRIRHFQRCGALFVRWGKGSRGSPPKRRTVLLVPEMDWVVEPFEEWLEEIRPLLNTAGLQAVFLTERGSRLAPRGLNAAFQRARDAAGLDTELDLHCLRHSYVTHLVEFGYPPRFIQEQVGHAYPSTSSIYTDVSDEFRNRLMHQALGAFAPFMWEAP

SEQ ID NO: 4783 - protein, 105 aa, synthetic construct
  REGION 1..105: note = TnsF-Tn7 System Protein
MTKKMTFEWHLRMRMAERGMFQTSDLVKPLAERGIVLSREQIYRLVTTPPQRLSMDVFAALCDILACAPNDLIEIKVAGTATTKAAGATRLPQVRRSTIRRPDLS

SEQ ID NO: 4784 - protein, 476 aa, synthetic construct
  REGION 1..476: note = TnsF-Tn7 System Protein
MRTHGICPNCGHDGVLPGRCRHDDPRPVCLLCAGIQGNYTCKTCGLEGEIYRRGQCARCTLREDLCKILLHHPADPAAMQTLIEVLCGVDRPESILTWKRNVEVLKLLGAITSGAIPLTHDGLTAAGPGRHVDHLRSLLQHHGLLPQRDEHLARFEVWLATKLDAIASPTVRAPVEQFATWHHLRRLRSMSKPGQGTDGPRRSAQQEITETIKFLTWLHDTHHRAAAHCTQRDVDEYLASGPTTRYWIRTFFVWATGAKITTGVKIGFRQARTTPTVTQEQRLAWINEMLTGDSETLPYRVAGVLLLLYAQPLTKIAALQATAIHRKDGETRIALGTEPVPVPEPFASLLNYYRDNRPNLRTAGGAVGTPWLFPSSRPGRHFDPQTIMKRLRSLGINLQGARNTALQELVSEIPAPVVAEMLGYSDRVTQRHATESGTTWGKYAHTGSRRTEAHPRSPLGSAAGAIHRPDEVQRDS

SEQ ID NO: 4785 - protein, 476 aa, synthetic construct; identical to SEQ ID NO: 4784
  REGION 1..476: note = TnsF-Tn7 System Protein

SEQ ID NO: 4786 - protein, 367 aa, synthetic construct
  REGION 1..367: note = TnsF-Tn7 System Protein
MPVDKSGRVFLVGAVPLLHPEVQTVDEMLDGWRNQQLCRNLAHDTIDTRIATVRRFIDQTNEFPWSWTPVIVEEFFGDLRSIKGRRQSTVRGYQNSLRLFCSYIADPDYGWDRVCEQRFGTHPAQVFFAWNTATHVQDNEQSPEKRPFTKQELQDFFDHADDQVTVIANARKKGWLPAYRDAVMFKVAYSYGLRFNELRHLQTVDFSRNPHAREFGHYGVVKVRYGKAKKGSPPKRRTVLTVFDWTPEVIADWLTHGHPYMDEGMDLFPSERGALVAERTLLRRFRRYCQNLGLSDGLDMHSFRRSYITHLIEDGWDAKFVQDQAGHEYASTTSLYTGVSSDFRTRTLRRVLDRTVNDALALGEETS

SEQ ID NO: 4787 - protein, 103 aa, synthetic construct
  REGION 1..103: note = TnsF-Tn7 System Protein
MAAHGMHNSTELIPLLVERGIQLSRPQVYRVVHQRPERISLQLMAALCDILGCGVEDLVTVTATDVRRRKTASGIPPSAPPNVVELNKSVRPRRARIITDGAD

SEQ ID NO: 4788 - protein, 488 aa, synthetic construct
  REGION 1..488: note = TnsF-Tn7 System Protein
MSRTRVRAEDLFCTRCRRGVRLGAAHWPEGYLCARCYDHALETYGACVDCGTERLTPGLAPDGGKLCTDCAGGLGNFICERCGREARRYRRGVCGQCVLAERLRELLDDGTGSIRTELLPLFDALRQMRRPKGALTWTSKLHVQRNLRALARGEVPLTHAGLSQLTPWRSVTYLRDLLVQAGVLPPADRQLLLFQRWLGEKLPAVSDAEHQRLLELFATWHVQRRLNILVGRGPLTGKQMQQARNEIHLATAFLIHLAERGRTLADCTQADVDTWYAGGYTARRLTHAFLRWAMRSKHMPKVTVPHRSTSNPAPLAQHQRLALLRQLVNREDVPLQDRVAAVLVLLYAQPLTRIARLGTDDVQHGNGEVLVRLGDPPSPVPAPFAGMLLDYLQGQRPNTMTATNSDTRWLFPGRRAGQPMTPATLELRLRHLGFPTQRGRTAAIRHLVLQAPAPVVARMLGYHDDTTAQLAAEAGGTWRHYAPGNHSR

SEQ ID NO: 4789 - protein, 488 aa, synthetic construct; identical to SEQ ID NO: 4788
  REGION 1..488: note = TnsF-Tn7 System Protein

SEQ ID NO: 4790 - protein, 993 aa, synthetic construct
  REGION 1..993: note = TnsF-Tn7 System Protein
MAAWSDTNELIGWGTAARLDRTDNSLLGRERELEQVHDVLSDPDGPRLVLVRGEHGVGRSKFLKEVGERLRAQGTALHALDCVPGNGERPLLLALRLVMALEQHRSASPRQRPAGNVVTRALSAVDQRDRTAMETLLRASLTQAAPSAVMVDDAQHADPDSLAMLCRIDSSRLAPGVRLVVSAVGRVAPGPGGRRESAPDAVGEGTSRHGRKTEEARAPGRDGRAGLLAQLAGIKGARTVALSPLGPDDITALAARWLRATPDAVLARHIEELTCGIPGAVDALLTGWTRRGEIRVADGHAFLGPRTPVPVLPDDDRFVTAVDALGEPYRAVAAALSILWPLGRTALQLTAAWTGLSPDAVNDGVRDLVEAGIVDELPGSDGATTEGWTFRLPLTAHTVRERLRPMERSRLSATAVEVLWAEADSGPPGQVKASAWALPDEHAAWTYRADRIADSGSLVDPDRALAELTAAAQQMRPGTDDQAVLRWLGAAVNLTEQHSTRVQMLQRYATAAYLASDYPTGRRVTEALLRNPGESLTLLALQDVACQLVALTANQQDWRALSRLATKRWWDELPVPTPAKVTGQALALCRLARWQEAADLLSRTQAVWNTTPSARAAPRCFKAVAENALGRPEAFRHELPMPEAPELPPGKVYGLAVAMFDELAVGYDLNAATTLLNSRGWTLKLLPPLSQFLHHHLTGQWDQALESARHLLATNEVQTPGSDSCLLPTRTAAILLARGRITSALNMVDSSCSPEESPPRWSMHASEAEALRTLGDMDAAEKTLRRGLAAAREHGQIYGTDELCALLAEVTAEAGRTAEAAEHMQHLEQLASRTGSDRTRLRYLLASARILRHDAPHTAREYLREAVDLARTRGLPFETATTLLAAATTGAVPATLLHEAYDVFGSTGATLWRFHTRTALREAGLTIPGRKQATAENDHLLATLIAEQLTNRQIATILRLNEDAVAQRLSRLFTRTGKRSRTELATAVLTGSL

SEQ ID NO: 4791 - protein, 968 aa, synthetic construct
  REGION 1..968: note = TnsF-Tn7 System Protein
MRQQRGAIIGRDGAVRDVVEALRATGEAARVLLVTAEAGMGKTAVLEQARRAAAQDGAAVLRLGWEDTDDTAGAIVVDVGCGLVVEDPDGCLLPVTVARRALLRAAAREGEVSGLSAFSEVLMEASRQSPFALVVDGVERMPQRSADTLALLLQVFRPRGVPVVMAGRPGPAADPGRAQLTAVADQVLALPPLQPCDIATLVDIHVTRRFGHPAEPALADAVSRALGTLAGNPRAVLSVLDALDEQDLAELDGRLCLTLPQKRLRLTTGSAELLRFGWPDAPADPEIVEAAIVTARVLDHAEVRFDDVLRLPSAEAQAIEHKLDRLVADRILTADQDGRLSFTVPALAAALRTLPTRRDVQGVYARFVTPLTDRLGAEATGSGYPRLADHVAAAGPGLDDALAVPLLLAAAREDARTNWPRSARAYAAALRRLTPQDGRTPGVLSEASSLSLRHGDHGGLLALGEPLLACLDTPHAENTEDGELAAAPETVAGASGTSADLETVAGAWVWAALHEHRSPWTDDTDSRYREALQRFPAVTGPAALGGLYGIGPLTPRQATAAHHVPDAVGWFAPGSSRTPLPSPAELRLVAAAVGSHAELRRARRNMSPDAIDDRALDRLRDAAAYADLAGALAAVLGDRNVAAPKGIAVQYRGMVRDYLAGDWDAALAAARRIEVRSRTHGTAGGPHLARALAAEIHSTRGDVAHATAWLDLVPDTLTHPLVARARLAVRYWSGRVEDALEEAWHDARQARKNGQLAGVERLLLRILTLAARSDRPHTVQQALEELEALHEEAATPMTHETLLIARGIAHHDADSALTAHRSIQRRGDVHLSVISSLCLTHIADDPRRWLTEAVRNAHTLGLGRPFRTAVTRAAQQRNIPIPRLRQGHQTLTEPDIALVRMVSDGATNRKIAAELACSPKTVEQRLTRLFQRTGTRSRRELTAAWLNGSLTTSGTVGDPPNPHSADDH

SEQ ID NO: 4792 - protein, 968 aa, synthetic construct; identical to SEQ ID NO: 4791
  REGION 1..968: note = TnsF-Tn7 System Protein

SEQ ID NO: 4793 - protein, 376 aa, synthetic construct
  REGION 1..376: note = TnsF-Tn7 System Protein
MTVLAGKDGTSPGAARLHLADGVPLLRPEEQVFEAMLDGWRNQQLARNLALSTINGRERKVRAFASHADAFPWTWSSTLADEWFGDLRAVRGCVRSTLRGYQEAVRLFCDYATDPAYGWAAECERRFGTHPIQVCHEWNTAVHMQECEAETPKRAFTRDELQAFFDHADDEVSRVRGRGRKGWLPAFRDAMLFKTAYAFGLRRNETRMLDVADFGRNPEGPEFGEFGVCYVRHGKAKKGSPPKRRSVLTVWEWSAEILDQWTSEVRPAMRHADGPALWPSERGRRVGLQRLDSRFAAYRDDLSLDPVLDFHSLRRSYVTHLIEDGWDALFVQQQAGHDHASTTSIYTCVSSDFRTRTLRRALDATVEAALKPARRA

SEQ ID NO: 4794 - protein, 108 aa, synthetic construct
  REGION 1..108: note = TnsF-Tn7 System Protein
MKRQVSYQWRLRERMAAAGMFTTSELAPPLAERGINLSLSQVHRLVTGTPERLSLPVLAALCDLFECTPADLIATKAENAAARKVATGDAVVDLSAVRPKRARIRPEG

SEQ ID NO: 4795 - protein, 428 aa, synthetic construct
  REGION 1..428: note = TnsF-Tn7 System Protein
MLPGLIDEKTVCVDCAGITTDFHCTSCGIEAEHYRRGICARCALRDDLTPMMLDNPADPAAMQTLVNIFCAVDRPESIHTWKRSTSVQDLLHRLASGEIPMTHEGLDRVDDDRRTAHLRSVLEHHQLLPPRDRYLALFEEWIANKIAVIGQPAVRRPAEQFATWHHLKRVRVIAAEGKPTRGPVHASKQDITETIKFLTWLHDTHNRTAATCLQLDVDEWLAAGPTTRHLVRTFFVWAKATRINRNVTIAHRSPAPTVTFTQDERLRWIRELLTGSSEALPYRVAGILLLLYAQPMVKIAALRTEQVSTDTDGLRIALGTQPAPVPEPFAALLRLQVASRATRLTGADAGWLFPSFRTGRHLHPNTLMDRLRALGINLRGARATTLRALVTQVPPPLAAEMLGYSYSVAHRHAELAAQPWAQYSTHRK

SEQ ID NO: 4796 - protein, 428 aa, synthetic construct; identical to SEQ ID NO: 4795
  REGION 1..428: note = TnsF-Tn7 System Protein

SEQ ID NO: 4797 - protein, 369 aa, synthetic construct
  REGION 1..369: note = TnsF-Tn7 System Protein
MGVDNSGRVIMVESVTPLHPEEQTVEDMLTGWRNQQLCRNLQLGTIEQRQQMVVRFIDYTNEFPWTWTPAMVEEFFGDLRSIRRVTQSTIRSYQTSLKLFCAYISNPDYGWDRLCEQRFGTHPAQVFFEWNSAAHVQDNESTPTKRAFTKTELQELFDHADTQVETIAGIGRKGWLPAYRDAVMLKIAYSYGLRFNELRHLQTVDFTRNPHAREFGRFGVVNVRYGKAKRGSPPKRRSVLTVFDWTPEIVEDWMLHGQPYLDAGLDLFPSERGALVAESTLIRRFRRYCTELSLSPGLDLHSLRRSYATHLIEDGWDPLFVQHQMGHEYASTTSLYTSVSSDFRTTTLRRALDATVADALGLGEEGEIS

SEQ ID NO: 4798 - protein, 112 aa, synthetic construct
  REGION 1..112: note = TnsF-Tn7 System Protein
MKRTVDYTWRLPELMAAHGMHNSTDLIPRLLERGIDLSRPQVYRLVTQRPERVSLQMMAALCDIFGCGMEDLVTVTAADERKKKIASSSAPNVIELNKTVRPRRARVIRDDH

SEQ ID NO: 4799 - protein, 342 aa, synthetic construct
  REGION 1..342: note = TnsF-Tn7 System Protein
MATAEITHELLDELPQEPATRYVRELLVHAGILPLRQENLVQLELWFRAAAQHLPAARSEIIRPFAEWFIIRDARRRATRRRYTDKAAHSDRSEIRAAIEFMQWLDDRHLDLRALTQTDLEVWLAQAKPSRPRLTAAFIKWTNKRGLTRNLEYPGYQRPAPATFLDDDDQADQLRRCLTDTSLPLDIRIAGALIRLYGLPITRIVHLTADQFHEDDTGAYFTFDKNPVLLPPTLARLIERQIAEGRRHSAVGALPDSEHQQLLLPGRLAGRPRSHGGLAAQLAKHGLPTLAARNTSLFGMAGELPPIVMCDLFGIHKNTAVQWAALAQDSWAGYLAALKATE

SEQ ID NO: 4800 - protein, 265 aa, synthetic construct
  REGION 1..265: note = TnsF-Tn7 System Protein
MKLTVDQLHIILDRTPILRAVNLDADKGDVVGLVGPNGSGKSTLLRAVYRSLRPAGGVVRVGGDDVWELPARTAARRTAAVLQDSGTTAGLSVREIVALGRTPHHGLMGRDGAEDREAVADAVARCGVEPFADRDYATLSGGERQRVLLARALAQRPRLLVLDELTNHLDIRARFELLDLIRSTGITTLAVPHDLDLAARLCDHLAVLHGGEVVAAGPVLEVLTPDLLRDVFGVRGHTERHADGVVRIIYAARPLADDPTEEAQR

SEQ ID NO: 4801 - protein, 265 aa, synthetic construct; identical to SEQ ID NO: 4800
  REGION 1..265: note = TnsF-Tn7 System Protein

SEQ ID NO: 4802 - protein, 526 aa, synthetic construct
  REGION 1..526: note = TnsF-Tn7 System Protein
MSRHRVDAGCARCERTGVKFATTWPEGRICRRCYQRATRIHGTCPGCGTNRLLPGLLDSAPACTDCTGIPKDFHCTRCGREDEPVRAGLCAHCCLTDDLTHLFDNGDGEIAPHLQPLFHALTGQKHARSAKIWLITNTEAVALIRALARGDVPLEHTTFTEHPAPSRVGFLRELCIEHGILSPVHLDIERFQAWLARKAALAHPDDARLIIQYGRWVHLNRMNYLAETGQLKKGTFLSAKQSTTVALEFLAYLRAQHTTPAGCRQAHIDGWLTGGPTTRSLARGFIRWAMKHGHLPVIEIPYRLAKTTPVITQQQRLAHIQQLLVPATSLRPLERTAALLLLIHGQPLARIARMQLDQLRIDGHGITIRFAAEHLRIPEPFASVVHARIEDLPNLNTAAHRDNRWLFPGGRPGQPIHQGTLMSLLRDAGIDLRGTKNAALRELVLQMPAPIVADSFNYSYTVTEQHRRNAGAQFIDYLTNARNHKAARPCACPDCSCTDEADMGAPDDRIYGCCLADCPYAHSPTA

SEQ ID NO: 4803 - protein, 526 aa, synthetic construct; identical to SEQ ID NO: 4802
  REGION 1..526: note = TnsF-Tn7 System Protein

SEQ ID NO: 4804 - protein, 826 aa, synthetic construct
  REGION 1..826: note = TnsF-Tn7 System Protein
MTDPASRYAQAQARQAHPITASFADGQRFDLDPFQIAGCHALEDGRSVLVAAPTGAGKTIVGEFAVHLAMREPGEKAFYTTPMKALSNQKFRELQQVYGEDEVGLLTGDTNINGNARVVVMTTEVLRNMLYADSPALRGLRYVVMDEVHYLADRFRGAVWEEVIIHLPSRVKLVSLSATVSNAEEFGDWLDTVRGDTAVIVSETRPVPLEQHVLVRGDLLPLFDDRAGIATAQVNQELMRLRSVRGSTFESNRRAQDYRSQRHRSQGDRSGGPRPSKGATRPLRSADMQRIERVDRPQVVELLARANLLPAIFFIFSRAGCEGAVQQVRRSGVRLTDRDERDEIRRIVDERTLTLPDEDLAVLGFWEWRENLERGVAAHHAGLLPAFKEIVEELFQRKLVKIVFATETLALGINMPARTVVLEKLEKFNGEARVAITSGEYTQLTGRAGRRGIDVEGHAVIQWSENLDPQAVAALASRRTYPLNSSFRPTYNMAVNLIDQFGRSRAREILESSFAQFQADRAVVGLAREVKDAEVSLAGYAASMACDRGDFAEFSRMRRELGDLERKGDRSGPPKVRQQRQEQIESLRRSLKRHPCQSCPDREKHARWAERYGKLRRHSDKLRQQIDMRTGTVARIFDRVVDVLTALDYVHVDADGATALTAAGATMKRIYGERDLLVAESLRTGIWKDLDPSGLAALACCLVYEPRRDESGPGEHGLPRGTFRGALTATQELWARLDDLEQDHRLPGSSPVATGLAQAMHSWARGASLDRVLHEADLAAGDFVRWTKQTIDLLDQLSMVADAPLATTARAALDAVRRGIVAYGSS

SEQ ID NO: 4805 - protein, 826 aa, synthetic construct; identical to SEQ ID NO: 4804
  REGION 1..826: note = TnsF-Tn7 System Protein

SEQ ID NO: 4806 - protein, 374 aa, synthetic construct
  REGION 1..374: note = TnsF-Tn7 System Protein
MRVSEGPVPGAVPAYLRSGSAVLNEAENVWVAMLDGWRAQQFARNLAPSTVEARRSIVLRFRAFAESYPWSWTAGLVDEFFMELRGVRGASRSTVLGYQNALRMFLEYLTDPAYGWSEQCWERFGDHPAQVFHDWNTARHASESIAEPGKRPYTRDELEDLFDCADERVLRIRRAGVKGWVPAFRIATLMKVAYAWGLRRNEVRQLDLVDLASNPRARQFGDAGIIYVRFGKAMKGSPPKRRTVLTLPEFSWAVEYLQQWRDEVHPLYAPPGSTSLWPSERGNQIITAGQISRTFTEVKREAGLDDDLDFHSLRRSYVTHLVEEGYDAFFIQQQVGHEHASTTSIYTGLSPDYRARVVDDAIARMATQALTTQE

SEQ ID NO: 4807 - protein, 112 aa, synthetic construct
  REGION 1..112: note = TnsF-Tn7 System Protein
MIRRVDHGWRLRELMAARGMTTISDLIPHLADRGITLSDSQLYRLLSSTPERINLTLLGAILDTLDCAFEDLVPVTVTATASRTRATGTADAAATVRSDGVRPARARIHRPS

SEQ ID NO: 4808 - protein, 495 aa, synthetic construct
  REGION 1..495: note = TnsF-Tn7 System Protein
MITVIKSPAPQYLCVRCGGTGQRRGVRWPEGFVCRRCYQHATRCRGTCPDCALPNKLLPGRNAKAEPVCTDCAGIDDPRLTCTRCGDQDEPHRYGLCARCCLTDDLTTLFTAPGADDITPELLPLLEVLTSQENPRSAIIWLRNPDVLELLTGIAARRYPIAHTTFTDHASPRTARHLRDLFVGCGILPAYDRNLDRFTSWLDTTLDTTAIHHARDVITGFATWNHLRKLRSRAEHGPLPEGPVRSAKQEITVAIAFVNWLYEHNVDLRSATQTDIDTWIATGPTTRSTAMMFVRWCTRQQHMHPELNFPHRQPRQTPVTSDEHRYAQLAETLRSSDTPTWVQAATVLLLICAQPVTRIAALPLDAIAVTDDGQVSIGFTGDPVAIPAALATPITVLTRARPHMNTAANHSSPWLFPGRAPGQHVNPQTLMKLLRNNGIDLRGARNSAMRELLRSIPPAIVADQFGFNPSTTERHALTIGTAWSAYPTLHENSEP

SEQ ID NO: 4809 - protein, 495 aa, synthetic construct; identical to SEQ ID NO: 4808
  REGION 1..495: note = TnsF-Tn7 System Protein

SEQ ID NO: 4810 - protein, 794 aa, synthetic construct
  REGION 1..794: note = TnsF-Tn7 System Protein
MATKKVTQGSAPHAADSHDLIRVQGARQNNLQDIDVELPKRRLTVFTGVSGSGKSSLVFSTIAAESQRMINETYSAFVQGFMPTLGRPDVDVMDGLTTAIIVDQQRMGANPHSTVGTATDANAMLRILFSRIGKPYIGSAQAFSFNVASVSGAGAYKVDKGGRQTTEKKSFSVTGGMCPRCEGRGAVSDFDLTALYDASKSLNESAITIPGYSMEGWYGRIFRGCGYFDPDKPISKYTKKELDDLLYREPTKIKVEGINLTYSGLVPQIQKSFLSKDVDAMQPHIRAFVERAITFTTCPDCNGTRLNEGARSSKIDGINIADACSMQISDLAKWVGGLKEPSVAPLLTTLGETLDSFVEIGLGYLSLDRPSGTLSGGEAQRTKMIRHLGSSLTDVTYVFDEPTTGLHPHDIERMNNLLLQLRDKGNTVLVVEHKPETISIADHVVDLGPGAGSAGGHVCFEGTVDGLRRSDTVTGRHFDDRAALKKSVREFSEVLEIRGANSHNLREVDVDVPLGVLVVVTGVAGSGKSSLVHGSLSGTDDVVSVDQGAIRGSRRSNPATYTGLLEPIRKAFAKENAVKPALFSSNSEGACPTCNGAGVIYSDLAMMAGVATVCEECEGKRFQASVLEYHFGGRNIDEVLSMSVAEAEEFFADGAAKLLPAHKILQRLNDVGLGYLKIGQPLTTLSGGERQRLKLATHMADKGGIYVLDEPTTGLHLADVDKLLGLLDRLVDSGKSVIVIEHHQAVMAHADWIIDLGPGAGHDGGLVVFEGTPSDLVADGSTLTGRHLAAYVGS

SEQ ID NO: 4811 - protein, 794 aa, synthetic construct; identical to SEQ ID NO: 4810
  REGION 1..794: note = TnsF-Tn7 System Protein

SEQ ID NO: 4812 - protein, 725 aa, synthetic construct
  REGION 1..725: note = TnsF-Tn7 System Protein
MKHVHPSIFALPDSLARKRDPALIGHDERHFSAIRSSIEKSRSDTAAQLAAAQKSSGRMGREVMERDFEIHRLGGRLRSLRRYGVDLCLGRVVASDTDEPVYIGRLGLLGTSGEQLLVDWRSPAAEPFFGATHANPMGLRSRRRYRWTNGTITDYWDEVFDLTGPITDAALDDQSAFIASLGTARSPRMRDVLGTVRADQDAIIRADARGALVVDGGPGTGKTVVALHRTAYLLYTESRLGHSRGGVLFVGPHEPYLAYVSDVLPSLGEDGVRTCTLRDLVAEGTDVVEEPNPAVAQLKASADMSVAIEAAVAFYEQPPTRNMIVETEWADLRLTPDDWAEAFEAPDPGTAHNEAREQVWDLLLTILADRYDGDEDPTEIRKSLQNNEPLRTELERSWTIIDAADLVADLWSVPAYLRRCAPWLGPEEIRSLQRPDPTRWTVSDLPLLDAARMRLGDPEHSRRTRRRELAAAAERARMDRVVDELMAADDDEMMAAQLRQDGIRDALVDSAGFEEIPTDPSAGPFAHIVVDEAQELTDAQWQMVLRRCPSGSITIVGDRAQARQGFAESWVERLGRVGLDRVRIATLGVNYRTPREVMAAAEPVIRAALPDANVPVSIRSTGVPVEYADTADLASILDRWLDSNPSGIACVIGNRAFPESERIRSLTPQLSKGLEFDLVVLIDPDSFGTGVEGAVDTYVAMTRATGRLVLLTTQREAAWRTSSTA

SEQ ID NO: 4813 - protein, 725 aa, synthetic construct; identical to SEQ ID NO: 4812
  REGION 1..725: note = TnsF-Tn7 System Protein

SEQ ID NO: 4814 - protein, 382 aa, synthetic construct
  REGION 1..382: note = TnsF-Tn7 System Protein
MRRSELPPGAAQLQLADGVAVLRPAEAVFEAMMTGWSRQQLARNLSPGTIASRVSVIRRFHSFCDAEGPWVWTASQADDWAAELRGIDGAAHSTVLGYQGAIRQFMAYLTDPAYGWITQCENRFGTHPIQVIFESNSAHHVQEGASDPRKRAYTVDELQDLCDTADDQVDRRRDAGVKGPMVAFRTATITKVAYAWGLRRNETRMLDLSDFGPNPRAPQFGQFGVCYVRYGKPSKGSPPKRRGVLTVPETAWVIDCLEQWIEHARPVFGRNSAALFPTERSDRISAGAVSTSFAALCDQAGLTDPGLDFHSLRRSYVSMLVESGYDTRFIQEQVGHEHASTTSIYTFVSPDYRTRVVASALAAAADRLTAANSTTTNQQKGP

SEQ ID NO: 4815 - protein, 115 aa, synthetic construct
  REGION 1..115: note = TnsF-Tn7 System Protein
MQYRIGYQWRLREIMAARGMNNISDLMTPLHDIGIELSASQLYRLLGNTPDRLPLALLGALCHVLDCSTEDLCDFRVDATPSRRTAGARGPAIAAVPDPMVRPTRARIHRPGPPQ

SEQ ID NO: 4816 - protein, 413 aa, synthetic construct
  REGION 1..413: note = TnsF-Tn7 System Protein
MTVLLAGPGGAVAPYWVPLIDTLLQSPTPSVLLEWIRDRSTARLLHDLAQRDQPPTHADLDLLAVTSRYTAEQARALLEAAGLLDPHDTRRNRIAARAQRRIGHDAHAEDRLLLGAYVRWSLLPALERRAQLTRTPIASRNISDLAVVIAYLNYLRRHGLTLKDKHQHRFDLWIGRHRSHRAPLRRFLVWAVRNRYSSPVAIPMSPRRDAREFISDDERRTLIGTALTGSDADWTLTDRFAVLLVLLYGQTPLRIASLTRAHVTTQPGGGVQLRLGRDPIDLLPPVAALARQILGQQALTQPLRDLPSLWLYPGHSAGRHLHPATLARRLRHLGAPARAAHNTTLLDLAQSAPSAVLADLLGMHLSTIESWGAASGARWAQYAGRDLPPQPHASRCEVSGLGGLRPKLVGPPS

SEQ ID NO: 4817 - protein, 413 aa, synthetic construct; identical to SEQ ID NO: 4816
  REGION 1..413: note = TnsF-Tn7 System Protein

SEQ ID NO: 4818 - protein, 389 aa, synthetic construct
  REGION 1..389: note = TnsF-Tn7 System Protein
MDVGKVGASVPGSALHMLPAGVALLSPEESVWQGMLRGWRTQQLARQLRETTVSVRVRVVERFQEFTGTYPWTWSSEDLESWFVVLRTTGVSGQGRAFGTLRSYQAYVAGFCGYLVSPAYGWAETCLERFGEHPVQICHEGNRIRHVLESETDPRVRPFTRPELQLFFDFADDQVERAARSRRKGWLTTFRDATIFKFVYAYGLRRTESLKVDTVDFHRNPATPEFGEYGSCSVRYGKSSKGGPPKRRTVLTVFPWAVEVLAEYQSEVRPLFEPDGVMLFPTERGGRVCGAYLDARFSEYRDAAGLPEDLHLHCLRHSYVTHLVEDGFDPFFVQQQVGHAYSSTTALYTGVSNDFKNHTLRRALDRCLDPAVTAPGREPRDAHLEGAQA

SEQ ID NO: 4819 - protein, 112 aa, synthetic construct
  REGION 1..112: note = TnsF-Tn7 System Protein
MRVLDYEWKLRPLMAQRGMYATTDLDPLLRERGITLSSTQIYRLVTGKPERLNLAVLVALCDALGCEAGDLIQPVVVATARRKRSTGTTDLAPVEARNSRNRPVRARITPAE

SEQ ID NO: 4820 - protein, 382 aa, synthetic construct
  REGION 1..382: note = TnsF-Tn7 System Protein
MFSQDVLRKQPSLAGARDALLAADTTHWSQFFGGVTTWPILKKMLAEGDVITHESLDSYGTPFQIKILRSFLVTTGALPARDERVVTLEAWIANAADQIDRDEDRRSFVRFARWRHLRQARQKALTESQLGWRRRELILVSRFLHSLHSNGSTLQIATQAHIDIWLAAGNKDRTRIRPFLQWCRDNSITGIVHFPVLPTPSLPKTAALAEDQRQRLLHEVLDPSVELDPGLRLAAGLVLVYGSRPHELAGLRLRDFVDDHDTIHIRFGLEPLQLPEALKIYARAAIAERSVARFGGISEDHEWLFPGPIHGRPVTTSTLTRWLRAIGLEPAPARSTAMGQLAMQLPPAILARLTGITVARAAVWHAATSASQARNLPDAPRH

SEQ ID NO: 4821 - protein, 364 aa, synthetic construct
  REGION 1..364: note = TnsF-Tn7 System Protein
MAYLDAEESVFEAMLEGWRAQRVGGRNLRRHTVVTGLGIVRRFREASGLFPWHWTPAVFDEWMEDLVAVRRRAPSTVRNYQIAVGQFCEFICSPLYGWVAQCEERFGTHPVQVCTEWNTTRHLQDYEGRPRRRPMTRDEVQRFLDYADEQVEVRLASGRKGALGAYRDASLFKVAYAWGLRAQEAALLEVTDFYRNPHAPEFGNFGMLLVRNGKSSRGGAPKRRSVATLHVWAAEAVKDYVENVWPLVRSESSKALWVSERGGHVSPAHLSRRFAEYRDDLGFDPVLSPHALRHSYVTHLTEDGVDPVFIQIIWGRNRGVFDVQHGARNRAVPRDGGAYLKLSITRDRGRVHAGSTSFGVRFAA

SEQ ID NO: 4822 - protein, 117 aa, synthetic construct
  REGION 1..117: note = TnsF-Tn7 System Protein
MNALDYEWRLREVMATRGLFSTTKLIPLLNERGIHLSASQVYRLAAEKPERLNLQVLVALMDALDCNADDLIGKIVVPASRRVTGTEQSASAESGLNVLKEKGFRPRRASVLPPSSE

SEQ ID NO: 4823 - protein, 327 aa, synthetic construct
  REGION 1..327: note = TnsF-Tn7 System Protein
MTGATGYLAALLMESGVLPTENFDRIRLEVWEEAQFAAIEHAEHRRILQRYAAWVVNPSFSDEGHLSGVDESLRLRRARAHLTTVMDLLNHIGELGMTLDTFPQRAFDEWVAIRGRRGRDATRFMRWARVQRLTRLRSVYEQSGTAAPSFSEDDRWAWVKYLLITEELALSWRVGGLISVVYGTLATRIVSLRRDAVHVTPHDVRLSLGSEPVILPTAMGELVKRLLDTRPAVPSATETWLFPGHRPGRHLTATALKAPLAKRGIHLAGARAVALMTLSRDVPAPVLADLLGISIEAATRWGKLSGHDWADYPRLRHTDFSASHDGD

SEQ ID NO: 4824 - protein, 265 aa, synthetic construct
  REGION 1..265: note = TnsF-Tn7 System Protein
MTPPTNIPRDLNRPQIQSVAYCDRCNKLGFVTRTHYAVNIRKFLTARRTLRDLVAAGAMPERLSALLRHAMADGRSILVSGATHAGKTTLLAALIGACPPEHRIVTVEETFELAVSAPDSVALQGRQPSLEGTGAVSLRRLVKEALRMRPDRLVVGEVRDAEALDLLLALNTGVPGAATLHANSASDALRRLAALPLLAGQNIDAGFVGPAIATGVDLVVHCRRDADGHRSVEEVVETTGRLVGGDVETRVVYRASDAASAREAS

SEQ ID NO: 4825 - protein, 265 aa, synthetic construct; identical to SEQ ID NO: 4824
  REGION 1..265: note = TnsF-Tn7 System Protein

SEQ ID NO: 4826 - protein, 360 aa, synthetic construct
  REGION 1..360: note = TnsF-Tn7 System Protein
MIRFEHVTKKYRGTNKPALNDVDFEVQRGEFVFLVGASGSGKSSCLRLILREDTPSDGRVVVLGRDLATLSTRKVPYFRRHIGSVFQDFRLLPNKTVFQNVAFTLQVIGSSRAFIQQAVPEALALVGLDGKQKRLPHELSGGEQQRVAIARAIVNRPQILLADEPTGNLDPATSVDIMRLLARINEGGTTVVMATHEAGFVDQMKRRVIELSGGAMLRDDRHGGYGDTSAIPSLAPQQERGVAATAALSAVMELQREIATSSVEPVPAEDASVPTGAPAAPAAAVAPAEAPAASPYHASPEPAQAPAPAAEPPARETKPQTRPIVIDAPVVQLDGLDLDDMTVAERLGLASDEDEVGPTS

SEQ ID NO: 4827 - protein, 360 aa, synthetic construct; identical to SEQ ID NO: 4826
  REGION 1..360: note = TnsF-Tn7 System Protein

SEQ ID NO: 4828 - protein, 369 aa, synthetic construct
  REGION 1..369: note = TnsF-Tn7 System Protein
MQPFLAFSELLQALAPGASVNVLRLEETVFQSMLGSWAHQQMSRGLSPDTIDGRDGAIRRFTDFTERYPWQWQASDVDEYSSHLRVLGRQRSTIRQLHGTLSLFCDYLISSEYDWVELCEGHFGDVPSQVCLPWNTTKHVADYEGKPSNRSMTYDEIERFFQVADSRVEVTARSGKKGALAALRDAQMFKTAYAFGLRRAELRGLDDHDLHYNSRVPKWGRFAALHVRFAKASRGGPSRRRTVLLVPHMEWWVEGMEQWMDEGRGLFGASVPALWPTERDTRVSLPYMDRRFAALRQEAGLDPALKLHCLRHSYVTHLIEHGYLDRFVQEQVGHLVASSTAIYTSVSGDFKNQILSDALRRFSTLEESG

SEQ ID NO: 4829 - protein, 712 aa, synthetic construct
  REGION 1..712: note = TnsF-Tn7 System Protein
MTLEVVHGQPDNRAAALQLAEVAASLVDDGTIYLGYPVLATADDRIEIDALLVSESHGLIAFRFADVLPGSNEDWQRLSSEQDSIYNTLESSLSKHESLRDGREFAVKIGTITVLSADLGPAPISTVATFSTFEQLPALIGARPPLPTEIYHNLQAALQRVTTIRPAKRRVDVKSDTSRGATMKVIERGIANLDFWQKKAAIETPDGPQRIRGLAGSGKTIVLALKAALLHAQNESWNIVVTFSSRALYQQFEDLVKRFSFAHMDDLPDPERLSIMHAWGSRGREGVYTRLADALGVQAHNFQSAAQKFGREDAFEGACQELLEIARQREDIVPLFDAVLIDEAQDLPPTFFQLVHLFTKDPKRVVWAYDELQKLDETEMANVADLFGRTPTGEPVVNIQNRENEPRRDIVLPVCYRNTPWALATAHAIGFGVYREGGLVQHFDDPQLWEDIGYRLDAGALTLGSWVELERSADSSPKYFLERMDSADAMVLRGDFKDEQAQDEWVAEQIIRDVTDGELEHDDILVVLPSAYTSKRRYVRLARTFEEKGLPSHLVGVNNSTDEVFIRGSIAVAHIFRAKGNEAPMVYVVDSQYAGAPFSEVSRRNTIFTAITRSKGWVRVCGWGPGMAGIAAEVAKVQQSDFKLKFTIPTPGQLAEMRRVNADLQPEGAVARGLLTLEELAEALERNEITAEQLPPKLVRQLNQLRIPDDDS

SEQ ID NO: 4830 - protein, 712 aa, synthetic construct; identical to SEQ ID NO: 4829
  REGION 1..712: note = TnsF-Tn7 System Protein

SEQ ID NO: 4831 - protein, 110 aa, synthetic construct
  REGION 1..110: note = TnsF-Tn7 System Protein
MTRVETTWNLRRVMADHQLYKTTELIPLLEQYGVHLSREQVFRLVTQKPERASMQVIGAVCAALGCTPSDLIEVRVVEEKTAVVEQTRGSIGDLRPKPARISRPGPRPAP

SEQ ID NO: 4832 - protein, 560 aa, synthetic construct
  REGION 1..560: note = TnsF-Tn7 System Protein
MNLRPRPCKQCSDKVAEYGRLRCFSCLHPDLPQPTCKACGSDAHYVGGYCRRCHPGVPYADSCSDCLAWGTWHRHGRCAACTSLRNRSHETGACATCRRTVPLLKHGVCRLCRCQAQAVPRTWQRPDLTTAATTGQQLFIADLVRRVHLAARPREHGSPEAHQLLGGSFWAMPQWRQEPLFIAERDMSRVTVHDVEPIDPAFTAYVSARAEASAEAQGWSPALRERVLRSLYLLTAVHGPHERIKASTVATLPRQRATRAITRVTEVLAHLDLLDDDRIDPLDAWIHRRLSNVHLEIRAEALVWIRIVRYGGPRRRPRSTNTVRNQVDASAPFLLDCSKRYRTLRQVTRADLTEWLAHCASPHNDAVALRNMFKTLKSQRLLFVNPARGLRLGPKPTSVPTPLSAEAIQILAAAADIDPALKLLIALIGIHALYPHQARALPLAAIDFTGGRLSFGDIDHPLDAFTRQAAADYIHLRNARWPHTRNPHLFISSQTAHSRTPVTIGWMQPLLKDLPVTARRLREDRILEEAAVTGADPQHLCAVFNITPDTGLRYTRPFHL

SEQ ID NO: 4833 - protein, 350 aa, synthetic construct
  REGION 1..350: note = TnsF-Tn7 System Protein
MSLAVVAPIRSRPLLESPQDIADFEQDLLSAFVLARAAAGIADETISGDVDALMEVRGWCGRPLWELIPTDLDRFFGEDQRRLATLTKVRKAHALATYFEFLEVRHQADIHAATGVLVQCPVDEINRPRGKTNMRVRIPPPAADVDRLFAGWRDDLHSARKYAPSVRNYTACRLASLIGPRVSELCLLEVHDIRWDLGTFGKVLLRGKGSRGQKKERLVPLINGSRELLEWWLQGPRWEFDGHLDEPGAPLFPSERRDPGGRCKRVSTSAIRGAMAERHLPRWSGRATPHALRHFAASDLYAQGMNVVAIQELLGHRWINTTMIYVHVNKTHIEDAWTSAGQRAASRFTG

SEQ ID NO: 4834 - protein, 106 aa, synthetic construct
  REGION 1..106: note = TnsF-Tn7 System Protein
MKWNLRLAAAQRDIWKSSQLQSMLADAGLTISAGKMSNLWSGQPVTIRLDDLDIICEVLGCQPNDLLAPEPEKARARRPASTSAPAAVAGEHPRIERRAGRTEPPL

SEQ ID NO: 4835 - protein, 285 aa, synthetic construct
  REGION 1..285: note = TnsF-Tn7 System Protein
MSSPQFVQSFHRFGLWLIEKIPAQRAALTIHRYFPFFYEMEKCWGKVPSYAQLLIHFTAEGLRRVRLPMRWLSETAQVVVDAQEREDESDLRRIAVIVASLPEGTPAAQVLIAYNSELQLRIAAGSISIRTARLALRPAASLLATCEKSGFQLPGQDALDSYLLNSPGQKASTFGFVSFINSRYGLNLVVRVDNQKTRSMRHKQLEAKMVKLLEKGQRDDAFEAEWISISLAYFHGLPRRVGKKSKRFSFSTDVEGNFSVVLNGQTYWLPHWDYRSGSVPDFTAV

SEQ ID NO: 4836 - protein, 285 aa, synthetic construct; identical to SEQ ID NO: 4835
  REGION 1..285: note = TnsF-Tn7 System Protein

SEQ ID NO: 4837 - protein, 247 aa, synthetic construct
  REGION 1..247: note = TnsF-Tn7 System Protein
MEISATIFGKLDATDSKVDRNSCDEALPRQTRKIKPTRRSVSGVHPFRGEASIPFESTLERDFLLRAEFLTDVLDVIPQPVQVPFIGNNGQRYIYTPDFLVYYKLGSKNYCNYPKPVLVEVKPEADWRKHWREWLPKWKAARRYALTQGWIFHVADESRIRDKVFENVRFLERYKRMTFALEDSEAVISSVRDMGATPIHYLLARHFMGLYRGEGVAHLWSLIASRRLDCDISQPLNEITQVWIPHA

SEQ ID NO: 4838 - protein, 642 aa, synthetic construct
  REGION 1..642: note = TnsF-Tn7 System Protein
MPNDADVSMPNEVFEPVRDRVDIGVGMLVRRGDDVYRIAQVLDFESVIGVDVSTGRSASLRLGDLRPLARDGKVPQSSNVDMAEIADEDWRIAQKRLAAIKPLLDRMHIGREDVELRGTEIGVDPATLYRWLQRYNAYGVASALIPQKRGWKAGNSRIGAEADALIEQVIRDFYLTPQRPTAQKTVIEVLRACQAKGIKAPGASTIRARISRIAEKEKLRGRGYREQAKNKFLPASGSFPNADFPLAVMQIDHTPADIILVDDVFRKPIGRPWITLAIDVHSRMVTGYYLSFDPPSETSVAMCVAHSILPKDDWMLLHKVDAEWPVWGIPKTIHVDNGADFRSNNFQQSCLMYGISLEFRPVKQPRYGGHIERMLGTLLREIHDLPGTTFSSVKARDGYDSEKHATMTKSEFEEWLVALICKVYHRRLHSAIGLSPTRKWEIGIFGNAEIHGVGVPPRPTNSLTILLDFLPFFRRTVQTFGVTIDGLSYYAEALRPWINAQDPETKKKKDLIFRRDPRDISSIWFFDPLLKHYYKIPLADLALPSMSIWEYQQAREQLRKEGIASVDEHQILRAITELRSRVDDAMEKTKTARRQAQRRKEHAKNISPAQPLPASSALPKPSAMPVTDGLLDGDIQDFGDIA

SEQ ID NO: 4839 - protein, 624 aa, synthetic construct
  REGION 1..624: note = TnsF-Tn7 System Protein
MKDHEISFLRAFNAKEMPDQEVARSFVPSTKFSELAGDWNSLLLGPRGSGKTTLLKMLRLSALRLWDHEKADAYRTAIKFTGIFVPADITWSEMIEALGRRKLAAKLRESIVQSVFCTNVLLALVEAFEARITPTLGAKAQNYRVAEYDPQALRAALSTICEFWGLKPKLISLSGMKAALQSRLLLIQAEVTKYIKRDDADSVQLEDALPFLYLHAITAVETAVNQFDTAINDAAGKWALLFDEFEIAPAEMQDMVFRRFRSAGNKIVYKVGLAPCTAHTMTSLARVSEATSTNDYVEVKLWYPEKKAALAFSVNLFRSICGRSAHESDADPIAIFGTNAFVVDDEDDLGAVPQPYGKGDEWKAVFKSLQIKDESFRSFLENKGIDPDCLDTSPTSLTGNTVRKIAPLVAFRDAFRREGVNATKRGRKKLNFAYSGWEAISAICEGNPRWLIGIMNMMLSAESLNTFSVKPSTQVDKIKEATESFTSMLALAPLASRGIQTQQPIDQLLRHIGEYFFTRLVQDEFVEEPPLSFRIDEKVSIDVQAAIRIAINHGALIHIPDTGEKNASFDDLIGKRFRLAYLLAPRFKLPLRATKYAALSSILAYVKNAKADNVIPTSNQMNLL

SEQ ID NO: 4840 - protein, 624 aa, synthetic construct; identical to SEQ ID NO: 4839
  REGION 1..624: note = TnsF-Tn7 System Protein

SEQ ID NO: 4841 - protein, 296 aa, synthetic construct
  REGION 1..296: note = TnsF-Tn7 System Protein
MNEYEHIHPDFRHVMALTNAERLSFLDQPRWIGHKVAQHILDTLQGLLLKPTRPRMPNLLIVGDSNNGKTTIIGRFRHLCGQGYVNEEAEPVKPIIVAEAPPSADEKGLYISVLEQFFAPYRATDPTSKLRYQVIHLFRSCHVRMLIIDEFHSLLTGSPVKQREVMNAIKLMCNELAIPIVGVGTREAVRVLHSDPQHASRFDVLSLPLWELNADFQRLLAGFEKVLPLQQRSNLHSPETAKLLHTICEGNTGNLHRLLVECAGEAIKSGKEHIDKSIIESKAWLRPTRGIRELVG

SEQ ID NO: 4842 - protein, 296 aa, synthetic construct; identical to SEQ ID NO: 4841
  REGION 1..296: note = TnsF-Tn7 System Protein

SEQ ID NO: 4843 - protein, 838 aa, synthetic construct
  REGION 1..838: note = TnsF-Tn7 System Protein
MRQTEAELRTEIVEVVRGIEPQLTSATANAIVEGLCSSKADLARLAGTMRRDSSVLTGDGTDCVATIEPLIKALQDAGGRAVVMPMCALCERGHSETYSRQLRKRICHSCARQRWNSQVVPCSECHRVRKVAYRARNGGVLCLRCPPEPDVDHEAKVREGLADLHTGLNAAVIDSIAAAFAATTVALRDLNWTLHDTPRVFTGDEPHVSARSVRLAEMLIASGAAGIRTPTCPKCSRAVPLRSTLDGQRCCRRCWANRNSRGACSRCGNERHLTDHHGVGERICTSCFTRAADEHRECAGCGRIAFITHRDGQVMLCRRCYRAPTAICSSCGRERPCDRVKTGKPVCEPCAGKQRPKQTCSVCGELRVAHVRTGTGQPVCYLCARKREPCSRCGKTRLVEARLDTEPLCGTCLEKEPAYFVDCARCGRHGRAYHHGLCHDCSCPEVLARLFGGADQPGPAATQIIGALLRSESAAVLHWAQRTKLRADLARGIRELGDTLDHGALDGLPPSKSVEWLRNILIGAQVLPDRDCVLRRTEIVIKKQLDGIDNPDDRAAIRAFMEWHHLRKLRGQARKAPLRAGQGATARTEVSAIADFLQDLNDRDLSLTTCTQRHVDDWLVANPTRPHLNQFLRWATKRRHAQGIAAPAPPERRARRTLVDGDDGRWALIQRLIEDSDLDTRDRVAGLLVLLYSQQTSRLVTLRADCIAGNEIDCCTITLGAVPLNLPKQVAELLACLAAQRRGYAAVDIGMNPWLFPGGRAGQHLSAQQMGVRLRRIGVSPLLARNTALIALAGELPAVVLAKLLGFSVKRAVVWNAEAGNTYPGYAAAVARRRVLAQ

SEQ ID NO: 4844 - protein, 838 aa, synthetic construct; identical to SEQ ID NO: 4843
  REGION 1..838: note = TnsF-Tn7 System Protein

SEQ ID NO: 4845 - protein, 404 aa, synthetic construct
  REGION 1..404: note = TnsF-Tn7 System Protein
MPDLGLLDPCGICRSREPDIHVDVDGGRVCQRCVLTCAQCYRCGARSIALTETAEAGQLCSTCVSRLHPCGSCSEATFTRLPVDTGGFVCGICAHQLYDQCFQCERYTLHSRYVVGNQRACPACAQLQRACRDCGTLIAGRRGCDRCADPHALWNYSYRPDPIFHGTGPLFLGLELEVIVPEDRFDDAIAAATDALGSLGYLKRDSSIRPSGFEIVCHPMTYQYALTEFPWPLLDKLARMGCETDTGVGLHVHASRTGFTGPAHIYRWMKLVYRNQDQVSMLARRVSRYAPFEPGTRARAKYLAKGCRNAIGLPRYQAINPHPRDTLELRVFASSLETRPVQAALAFTDASIRYTADLTVPQILAGGWNWDRFTDWLTHRLEYAPLVAELADLAREREVLLCAS

SEQ ID NO: 4846 - protein, 416 aa, synthetic construct
  REGION 1..416: note = TnsF-Tn7 System Protein
MPTAVMVDLAACEACSTPHPLTELVETAEDDRLCSGCVADLQLCAGCDLPAQDTALTTYDDYRCAGCRSAFSVCDDCDRYTRYNIAVISGGDVCESCALEYSTCDDCNFAVAEPVSINDERDVCADCRQDYRECDRCETLIRGRDDYCDDCYRPDHSLVHDSEYTPRPIFHGSGPLFLGLELELRTTAHGFDDSVETANDQLGRVAYLKHDGSISCGFELVTHPMSFDYAISEFPWSVLRRLRLLGCYTDDEVGIHVHLSRAGFDSPVHIYRWLKLVYRNEDEVTMLARRQDSQWAGFHPDIRAKAKELAHGGRGWGRYHAINTRPPHTFELRIFASSLQRQQVQAALGFAHASVEYTRTLRSYDVARNRGWDWTTFTEWVAIRPEYAALTAELAALGATGLGVSTGNQEDLACAS

SEQ ID NO: 4847 - protein, 333 aa, synthetic construct
  REGION 1..333: note = TnsF-Tn7 System Protein
MTHRNAPLSVEGRRRLVQRCQNRPIAHVAAEMGISRACASKWVNRHRRHGDLGLLDRSSTPHRQPTATDAAVVVRIEDLRRTYKWAAARIAFELQVEGIVISRRTVSRHLAALGLSRRRFIDPDGAANRQPRRIVARRPGHMIHVDVKKVGRIPDGGGWRAHGRGSEEAKDANRHKRTKGRGGYVYLHSAVDGHTRLAYTEALDNEKAVTAVAFLHRARIWFAAHGITRIERVVTDNGACYRAGAFARALLGSRHQRIAPYTPRHNGKVERYNRIISEEFLYARTWTSEKQRADALAVWNIHYNYHRPHGAVGGRPPAARVQHGVTNVTASYS

SEQ ID NO: 4848 - protein, 343 aa, synthetic construct
  REGION 1..343: note = TnsF-Tn7 System Protein
MVGAMLSGWAKQQLGGRLSRETTVKVRAAIIGAFIEFSGLYPWAWTAAMMDEWSAHLVGERGLAKSTIRQKQGAVRVFCDYITSPYYDWPAMCEDMFGQHPIQVCHEWNTAAHLVDYEGDPGRRPFTRREIQDFLDCADDRVETARKSRRKGTLPAYRDTTMFKVMYGWGLRINELCKLEIVDLHHNPHAPELGRCGILHVRYGKASKGSPPKRRTVPTLMPWAADALLDYVEHIRPLYKPGAKNAMWLTERGSQIKTRTLTDSFDEIRDRAGLDTNLTPHCFRHSFISHLTEDGVDSRFLQEISGHRYASTTGIYTHVSGEFMNTMLANALRRVTTITEANE

SEQ ID NO: 4849 - protein, 117 aa, synthetic construct
  REGION 1..117: note = TnsF-Tn7 System Protein
MNGAVDYRWHLRRLMAERGMFNTTALRPLLAERGVKLSASQIYRLVTEKPERLSVATLAALVAILGCTMDELIEVVAVKPAANRVVAGERRSAAKPGRNSEIGVLRPVRARVIDPDS

SEQ ID NO: 4850 - protein, 544 aa, synthetic construct
  REGION 1..544: note = TnsF-Tn7 System Protein
MGKRQRDCVECGASVGIIGRRHCCRCQNRLKEAALKATCPNCGKQRVLRDDTGRCITCSRICITCGHPVRAKDTTLCRDCARRARQQAAQQPCPRCRRPGYLRDGTGWCGPCSRPRRPKDPPRVCTECGQLRRHAGFGLCSACWQSRPERPFNAGDNLLARLAGPPPWLGDLIGHLASGHSPARACNMIGDLGRLLEDQHSNHPQALLERARLPGRSMGPLARALETFFTDRGLALATDQAEQLAAGRRRRRIDAVPEPLRPAVESFNTFMLRSRERARRAGTLPRSDVTIDGKLSTVRDLAKLITERGKQDWALVEVHDIEAFLNILPKGRSRRLTITRQFFRFAKAHKIVLVDPTRGLSAKATKGFTGKILTLDQQRELFRRWTTDPAAHPHEVLLGILALLHGASSNEIRHLRIADLDPLDRTIRLGQRPHPVPMDPVSWTVLQRCLTHRQIQRTDNPHVMVTKGTKAGKTPASIAYVSHVLDACGISPRTLRSTRLVDLVNTMDPKLVAAAFGMSPEGVMIYLADHIDPTREAALPADRP

SEQ ID NO: 4851 - protein, 339 aa, synthetic construct
  REGION 1..339: note = TnsF-Tn7 System Protein
MPDIWWKAHPHDLHRLQDRVSSVYVERSHVDRDENAVVVINKRETVRVPAALVAVLLLGPGTRITHGAVNLLGDSGTAICWVGQQGVRLYASGLGPARGVGLLQRQAYLVTRPKERLNVARAMYAMRFPGEDVSTATMQQLRGREGTRIRKLYQTHAERTGVTWNRREYKAGDAHAAGDDLNRLLSAANAALYGICHAVIVGLGASPGLGFVHTGSAISFVLDVADLYKAEYTIPLAFDLAAQGLTDERDARTGLRDLIAENRLLGRIVHDVKTLLTPDEATRLPVDEDINQLWDEHAGAVSGGVNWSGSEDLIQPGMGDQHLAIIGPEFEPPTSDSTT

SEQ ID NO: 4852 - protein, 355 aa, synthetic construct
  REGION 1..355: note = TnsF-Tn7 System Protein
MAPSRLRVVEGGAAPQEPLVIDPLEYQARCVEAFVASWTARGFSPVTIENDTGLLERTLVALGRPAWEVTPEDIDRVVGDLAVAGRAASTRRDYVQTFKGFHRFLQVRKAVEIEAAFGVRLVCPVDEFNASRHVGDDSPAELPPPTPERVTEFFEFLKTRIATARKYAPAARDYAMFRTLYHAGLRSEEAALLDRPDVHFNRGPFGKLHVRFGKGAHTSGPRPRWVPLLDGLDLVLRWFLDDVRGRFPDSAVLFADESGGSLHRGTIRNRLRYLMRLEGRPEADWFSPHALRRACATHNYERGVDLVAIQQLLGHWTVSSTMRYVRPSATFIEDAYRRAVTTTLTELTDGGEPPA

SEQ ID NO: 4853 - protein, 105 aa, synthetic construct
  REGION 1..105: note = TnsF-Tn7 System Protein
MKIRWKLRMAAAQREVWTGAQLRRLLAERAGLELSAASVSALFTKEPSQVKLSTLAALCTALECTPNDLFEVDTTPVERPARPPQAVTEQPKSASAGGGRSMPPL

SEQ ID NO: 4854 - protein, 258 aa, synthetic construct
  REGION 1..258: note = TnsF-Tn7 System Protein
MSELVTTRIRATAAKLGLPHLAQQLGEFVGRADEAKMGYLDFLDLALEEELAVREERRIRHALRISRMPHHKTLDDYDFSYQPELDARKVRDLATLAFVEAKSNAALLGPPGVGKTHIAVALAVAACRAGFSVYFTTLDDMVRQLKAADAIGRLATKLRVYLRPHVLVLDEVGYLPLARDEANLVFQMISKRYEKGSILLTSNKAFSKAHMFARTCARWRLKLHRLVSRGWAGCDHRVGERLHLLQDCCRSAALLPCP

SEQ ID NO: 4855 - protein, 258 aa, synthetic construct; identical to SEQ ID NO: 4854
  REGION 1..258: note = TnsF-Tn7 System Protein

SEQ ID NO: 4856 - protein, 487 aa, synthetic construct
  REGION 1..487: note = TnsF-Tn7 System Protein
MSPARAAECTRCGGIGATFVLPTGAVSANCRRYLAYHPEVCPECFELGPIVYPSLSAYGVLVCAGCAEEASIFACTDCGREDQPYGGQRCARCVLADRLTTVLADPTTGDVHARLRPLFDAMISSERPQTAIYWLSRPPGIGPALLRKMATGEVTISHATFRDLPADRAHYYLRDLLAAVGVLEPYEPRIERITPWLTKQTTPLTPLHRQTIEQFAHWTVIRRLRNASDRDQLTKGAVQGARHQIKKTIELLTWLEQHDTTIADATQADIEFYLASTTTHSVTITAQFTRWLADTGTNHQVRLASLPPSKAAVTMTDDERWRHVRTLLHDDTIRLYVRIGGLFMLLFAQNLTSISRMRADQINTDDPARVMVTFRDEPAQMPEPLGALLREQLTRRGHASYASRDNGWLFPGGRPGRHLLTANFRGALVDLGIRPHSARHAALFALATEVPHMILAQALEISHTSAITWAALAARDWSGYIPHRVNR

SEQ ID NO: 4857 - protein, 487 aa, synthetic construct; identical to SEQ ID NO: 4856
  REGION 1..487: note = TnsF-Tn7 System Protein

SEQ ID NO: 4858 - protein, 340 aa, synthetic construct
  REGION 1..340: note = TnsF-Tn7 System Protein
MLTGWDRQQRSRLLSEDTVTARVRLLRRFTEFAGSFLWQWTPGDVEDFTVSLMTGAERLAPSTIRGYHLTLRMFGDFLLDARYGWVAQCEERFGAIPSQVCHDFNTVAHLAEYEGRPGRRPFTYDELQHLFDFLDTRVEQVQRLGRKGAWAAMRGAQMVKTCYAYGLRRRELCNLDLPDLRPNPKMRQWDTYGAVHVRFGKAGRGKVPRRRTVLTVPEFDWVVDGMRQWVEDVRPILGREKLEALWLTERGQRISVKSMDHRFAWLREQADLDPELTLHCLRHSYVTHLIEFGYPERFVTEQVGHSYAATTAIYTSVSNDFKNKTLQAALARVYRPEEEP

SEQ ID NO: 4859 - protein, 110 aa, synthetic construct
  REGION 1..110: note = TnsF-Tn7 System Protein
MTRKLSMRWNLRQLMAAKGMFQTTDLLEPLRERGVELSRQMVHRVVTKTPQRINTDLLAALCDILDCAPNDLLELRVEEQRLKAVNDHGPGIGDLRPVGARVRRPEGTVE

SEQ ID NO: 4860 - protein, 272 aa, synthetic construct
  REGION 1..272: note = TnsF-Tn7 System Protein
MRELQALPAPIMGSRTTSRRRELYIVIDLLSWFDQRRISLRDITQSQLDEWALTGTERHRVTGFLRWARRNGLARELTVFRRKPPGPTPGGPADEERKSLLHQILHDASLAPGTKLAGALLLLYGVDPYRLVRITLDQIDTSDGLARIDLGPETLYLPEELGLVALATQEAREAQRLQHTVEDTFWLFPGTRSGYHLANTTLTSRLHRAGLSVANTRRGARTSLAGQLHPTILAALTGIHIRTAVKWYEALAVSRSTYVAALLEDGRLSPTT

SEQ ID NO: 4861 - protein, 272 aa, synthetic construct; identical to SEQ ID NO: 4860
  REGION 1..272: note = TnsF-Tn7 System Protein

SEQ ID NO: 4862 - protein, 339 aa, synthetic construct
  REGION 1..339: note = TnsF-Tn7 System Protein
MVAGWGAQMRGGRGLRKAFVARSQSQVCAFQEFVDEWPWNWSSRMFDEWASELEARGLALSTRRNYQYSIRGFCEYLLSPHYAWVEECEDRFGTHPVQIVHEENSIRHTPGVDGDPRRRGLSSDELQLLFDRADREVDIRLTEKRKGATLAYRDATLFKVIFAWGLRANEACHLEITDLFRSPRQPQFGNIGVVQVRMGKGSQGSGPKSRTVATLYEWAVEALQDYLSEVRPLLAKPGISGNTIFLTERGTRMKPRDIADRFAFYRDELSLDPSLTPHSLRHSYATGLALQKVDAKFIQEQLGHTYASTTAIYTHLASDFMNSMMRDAIRKVTGEPEHG

SEQ ID NO: 4863 - protein, 117 aa, synthetic construct
  REGION 1..117: note = TnsF-Tn7 System Protein
MRVIEYEWCLRDLMNSARLFKAADIQRALKSRDVDMSYSQVYRLVTEKPDRLNLHVLVALMDILKCSADDLIRPVAANTPSVRTGTALNADVPGGSSALRASGARPKRAQILPDAPT

SEQ ID NO: 4864 - protein, 516 aa, synthetic construct
  REGION 1..516: note = TnsF-Tn7 System Protein
MTAANTPKADGTTTPGATRTVKALCPACSRLRRLRPDTGRCPWCSRTCTLCGAPRRSSQQLCAACRCRESGQRALGPCRHCGRKRVLDPATRRCRACADPATAEPAAQCQHCGKSGQWAKGLCKRCYEHSPRTVITRADGWAKRMPTEPSWWNDFAAHLAEHRHPIYAADLVATTARLILTTSACDPPTLLAHARNDAPELTGALTDFFRAHGHLSPPPGLAGRRAAARRARRIQAVPAPLRPQVQGFADFLVLQRERAPQLGLRPNQLKTIEIRLDAIRDLAGHLHAEGHRNWASVTTADLESFLCRTPARRASRLTGLRQFFAYAHHTRAVLYDPTGPITALQKRGFHGVTLTLAEQRALYQRWTTAPDIHPHEAFIGLAALLHAATITELRHLTDPCIDPARHTIQFPGRQVELPPDNATWTALQRCRDHRSRLQTDNPHLLVTRLTRTTCAPAGAAHIRDSLAPAGLLPRILRSTRLVTLAEELDIKVLTASLGMSYAGVSHYHNTAQIPAT

SEQ ID NO: 4865 - protein, 234 aa, synthetic construct
  REGION 1..234: note = TnsF-Tn7 System Protein
MRFIGANGLPEQRPWLEVAAELVPADCPPVRGFAVRRGRRLAPGWWWAATTGRLVAYGSAAMRDHLMLLDQERRVVGLACRPLEFVWRDGRRVVAHAPQLAARIADGGHVLVDCLGAGFLPRRLAGVQAVLEECAQEAGWQYRVEPAADPVVVANVRWLSGYRHPRCAGSVRPGRLRDVFTSRRPLAEGTAALGDVVRTLPVVYHGLWSGELTAALDRPLTEGTLVAAAGRHGR

SEQ ID NO: 4866 - protein, 122 aa, synthetic construct
  REGION 1..122: note = TnsF-Tn7 System Protein
MLDGLERILAWYLSDVRPFFPGTAPLFCDARGRALKPETVRDRLARLLDLEGRSGNDRFTPHDLRRACATHHYEQGMDLVTVQQLLGHRHIAATMAYVRPSMAFVEDAWRHATLTAITGLAG

SEQ ID NO: 4867 - protein, 344 aa, synthetic construct
  REGION 1..344: note = TnsF-Tn7 System Protein
MPAPPRPSIRRVAPLQWETTASYIQRLARSHHLTTAELLNGLGIPRPRVDNERTRPHAPHTSIELYLNAPSRRLIASFAGVPEEHLCHALPQWDQYRDKPNPASARARLRPAPVNAVTGCPGCTLARTGQRHPVPQYLPDSRLICRRHHTWMLGRHTLAGTQLPIDHADLEHTPEILTAHRTHIRFLRRWGTAADHALAQSMSLTETWRRTAPAQERIWPARARRIGNNKRTRLWYALARAAITYPETITLAQYIAHHPRTLTALERPESAPPVHTAIAALLGRPWLQDPAFYPDRLNNRINYAPSPHPGARPRWTYRHPGPTELTHLGYHPPARHNRPAPTTA

SEQ ID NO: 4868 - protein, 355 aa, synthetic construct
  REGION 1..355: note = TnsF-Tn7 System Protein
MRHVVEVGDQIRFAGGVFTLAGLDGPRCRIVGEDGSVQVLLLTQLYADEDFCVVADCAEPRRAPVWGPLAGLEAGVREKALAWERHIREVETGHPEPGGRGAPREEFAPELRSLAEREAAKAAELTEQGQPVSVATVRRMRTRYRRQGVWGLVDGRTTRARSPWGRADERVVNAIRTALEAQRERSTGTLSRLRRQVGWLLEDAYGPGTVEVPPVATFNRLVHAVADGQGLLDPAVQQRWRTSRPEPPFTPTVAARPGELVMMDSTPLDVLAVLEDGRTGRLELTMAMDVATRSITAAVLRPRGTKAVDAAVLLAQTVVPEPLRPAWAEALAMASSVIPYERLLSIDARMQGAAA

SEQ ID NO: 4869 - protein, 100 aa, synthetic construct
  REGION 1..100: note = TnsF-Tn7 System Protein
MAAAQRGIWTGTELRRLLAERAGLELSAASVSALFTKQPSQVKLPTLAALCAALDCTPGDLLTLHTTAPSPAPAPSTAPAPAPPLPVQPQSPARRSMPPL

SEQ ID NO: 4870 - protein, 327 aa, synthetic construct
  REGION 1..327: note = TnsF-Tn7 System Protein
MIFPSTVVIDQGRVFISQCFLAAAEHLGISVQPCPPASGPAKGHVERGFGSVGTLFAQYVSGYTGCHISRRGRRVEDEACWTLPQLQDLLDEWVISGWQERRHRALCHPLMPKLALTPNEMWAALVGIAGHVPVPLKAADYIELLPARRCAIGAEGIRFDYRTYDSKALNGHRQRSTAQDGKWEVHYNPYEPSRCWVRLPTGWAEAGWIHRTLVSRPFTDTAWRHIRTVVEQRAGRAEHEEHLARALDELLRRAGGKTAGTRGQEPATGFGAGPTGVVPQADTGVLGTREASRLSEEEPDQDDADDPVTGTADAWEVFDAHQEAEQW

SEQ ID NO: 4871 - protein, 333 aa, synthetic construct
  REGION 1..333: note = TnsF-Tn7 System Protein
MVVPGQAAAHTGPFASPTTWREWMQFIDAEPPRLPGPGPWTLQERLDYHSRFVILSTPVMDKISLTLRRLMILNRHHNGTARRGLMISGPPTTGKTTALQQLGRSFHLADRARHTDPGERLPVVFLSVPPAATPKMLVSELARFLDLPIAKTMNQARITDIVCGALRDLATRLVLVDDVHLLNTRTRAGAETSDQMKHLSERIPATFVYAGVAIEASPLLTGNRGAQLAGRFKMVRNPPLAYGSTTQRTAWEGLVGGMESALRLTHHRPGALTRHAAYLHQRTAGRIGSLSALVREAAIAAILDGTEKITKRLLADIEVDQLAEQTARPPART

SEQ ID NO: 4872 - protein, 333 aa, synthetic construct; identical to SEQ ID NO: 4871
  REGION 1..333: note = TnsF-Tn7 System Protein

SEQ ID NO: 4873 - protein, 681 aa, synthetic construct
  REGION 1..681: note = TnsF-Tn7 System Protein
MTADAITWSPPATGRLLAVLQLHLPQAGRRDLEAAVRSVLADVGDVDELVAFLRAHDDALTLSRSAVPAGFPALAHVLSRTVGSSISAPHCVRCRKPSFFLAEPFEDGRICLRCTELVRPCSDCGATGGAWRATTRGPLCPTCLHRMRHPPRPPRPPQPRRRPLVTCALCDTSRPPAVQWPLGVVCKPCYYRTMRSWRPCDICGETRPLIARSPSGSERWCGRCSDSAFDYACLHCDARNDLYTGTCCAACALTAEVQQLFATAGSSADQWTPLREALLTTDEPLKMINWFKRSRVARLLREVIAAQSPVTHEMLDELPHRSPVHDIRDLLMSCDILPLRDAEYLQRIDAWLRDELASLPASHVRILTQYVRWYVLPKAQRVVARRGVGGSVPAPIPPLFRAAARLLTWLDEVGVGLPELTQSLLDEWLTEGRGYYRHLYPFLNWARTQGITDPRVRVPLPAYPQRANYLDSGERLAQLRRCLDDEALPLHVRVAGALTLLFGLSITKVVQLRRDHVRVDDGAVSLHVDCHLLAIPPKLGKLLTQLATQPTSGTRALSKLSGVSPLPYPGKAAHRPVLPSTLYNRLREHGIPVLSARNTARLALAAELPAAVLASMTGIEVTTADAWNKRVGHHWTPYIAAKDDAQGGACAANSSASREEAERPRPSSADRSAAFSQSGDR

SEQ ID NO: 4874 - protein, 681 aa, synthetic construct; identical to SEQ ID NO: 4873
  REGION 1..681: note = TnsF-Tn7 System Protein

SEQ ID NO: 4875 - protein, 371 aa, synthetic construct
  REGION 1..371: note = TnsF-Tn7 System Protein
MENGTELTGSAGLMLVDGVAYLDPETSVFEAMLSGWDRQQRVRAVKPQVIENRVGFVRRVARVSNQYPWQWTSAEVEAFFADLTSNGRPLAMSTMRGYECVLRLFLGYVTDPRYGWPVVCEQRFGSAPQMVLHEFNSIRHVADVECRPGRRPLSYDEVQALFDTADGLIEQIRARGRKGSVTAMRNALVLKVVYAFGLRRREAWGIDLPDFRTNPHVPRFGTCGGLFVRWGKSSNGSPPKPRTVLLVPEMDWVLEPLEQWLEEIRPTLIRRSQSALLVTERGSRLARRGISEAFQAVRDAAGLDPELDLHCLRHSYVTHLVEFGYPPRFVQEQVGHRHASTTAIYTGVSDDYRNRLMQKAVASWAPELWET

SEQ ID NO: 4876 - protein, 106 aa, synthetic construct
  REGION 1..106: note = TnsF-Tn7 System Protein
MAKTMTFEWHLRLRMAERGMFQTSDLVKPLREHGISLSREQVYRLVTSPPQRLSMDVFAALCNILDCQPNDLIEVRPAAGGQRKAVGGSSAAPTVRRSKIRRPEPS

SEQ ID NO: 4877 - protein, 729 aa, synthetic construct
  REGION 1..729: note = TnsF-Tn7 System Protein
MLERAKAWSPQAARKLDVHIAEHPDALTAPSPHCPGPLPRLLQVLEAAGHGDTVTQLACAICGRAGRKLPRPTPHGRACDWCVDQHKLRTCARCGKSGLIAARSEEEGGICRSCYKSDRRFTGPCAECGRRGTHQLRRRSDSLIALCRPCAGFTDRECVRCGTLRSVHAHSAAGPVCQRCYVAPAKLCGKCGQFAELAKRGERGELGVCYRCYTREGVCTVCGRFRDGAFSQTAGGAFLCDSCRPRPSHRCADCGCAKKSCALWPVGHLCYSCYSRRRRNPESCSLCGIARVLVDRNDNGAEICGPCCGADIDFSCQRCGSPGDILGDGCCVGCVTGARVNDLLADEDGRIVPALKPLALALGSAPRPRSVLAWLRRSPTARLLAALAASHAEITHELLDDLSQNAATRNVRDLLVHTRVLPPRQEYFNQLELWFRKVAQDMPTAHIEFIRPFAEWFIIRDARRRANRGRYSLGASTVDRNEIRAGVEFMQWLDGQQMPLTSLTQTHLDVWLTQATNSQRRSTAAFIRWTNKRGLTHNVEYPGRPKSQPILFLDDEEHEHQLRRCLTDASLPLELRVAGALIRLYGLPLIRIVHLTTDGFHQDEQGAFFTFDKNPVLLPPTLARLIEQQITTGRQHSALGPLAQEHPRLLLPGRYASRARSPHALSAQLTKHGLPTIAARNTAMFGMAGELPPIVISDLFGVHRNTATQWAALAQDSWADYLAALRATE

SEQ ID NO: 4878 - protein, 729 aa, synthetic construct; identical to SEQ ID NO: 4877
  REGION 1..729: note = TnsF-Tn7 System Protein

SEQ ID NO: 4879 - protein, 360 aa, synthetic construct
  REGION 1..360: note = TnsF-Tn7 System Protein
MLARNVIHLDPAPAVFDAMREGWARQQSARFLREKTISPRLRLIKRLEEFTGLYPWQWKPADGEAFIAHLRGGSDPIQMSTARTYEVTVSLFLEYLMDARYEWIDTCLERFGEVPQAVFHEGNSVLHTVEYEADPRRRPLTYDEVQALFDAADARPSRIRGLGRKGALAALRDAAVLKTVYAYGTRRTESSKVDLADLRRNRKAPQYGKFGSVMVRFGKSSKGAPPKRRTVLLIPEMDWVTDSLDHYLTEVRPEFSPGRHPALWVTERVGRLSPRSINEAFVAARRDADLDEDLDLHCLRHSYITHATEFGYPARFVQEQVGHSHASTTAIYMGVSNEYRNTMLEASLKNRLGDYWDVTP

SEQ ID NO: 4880 - protein, 108 aa, synthetic construct
  REGION 1..108: note = TnsF-Tn7 System Protein
MIKKMGYQWQLRHLMAERQMFQTSDLVPLLAERGITLSREQVYRLVTQAPQRMSMDTLMALCDILECTPNDLIKPEIINVQVRKTAGGETGPAPSAPRRTVIRRPGQS

SEQ ID NO: 4881 - protein, 499 aa, synthetic construct
  REGION 1..499: note = TnsF-Tn7 System Protein
MARPRPPEDPVAYRNPCARCGEHRETAAHWPDGRVCQLCRRQAIRTKGTCALCDHQGVLPGVSISGPTCRACSGIRLKIDCAICGAEDELYSEGRCWRCVLAVLVDGALSHPGTGQIAKDLIPLADALKSMKRANSGLTWIRQPHVQIFLSSLARVATVRHDQIDALPRSTTREFVRSLLVTHGVLPQRDSYLMTFEHWLLDVPARLTSPAHSTVLEKYVRWDHLRKMRARSPVSRGTFLRSKQAITVAVDFLNWMDAEEISLAELGQDDVEAWATGGTTTRLIAERFLNWARKEGLVSRNLRMPQHRRGTASRLTLDEQQDASTRALDPNMMTVRDRAAAVLVLVFGQQLERLVRLKWRDVRVTPDAVYVSLGGDPMPIPAPFDDAWRELHANPANCQTASHPKRDLVFPGSKPGQPINPGYLANRIKAIIRARAARLGALDELTKLGPVVVVAGALGYSPRTLETYAFDGGATYARYLGAVKELAKAATPGTSMLER

SEQ ID NO: 4882 - protein, 499 aa, synthetic construct; identical to SEQ ID NO: 4881
  REGION 1..499: note = TnsF-Tn7 System Protein

SEQ ID NO: 4883 - protein, 351 aa, synthetic construct
  REGION 1..351: note = TnsF-Tn7 System Protein
MVEGWRTQMLARGLTVETIRSKIATIERFQVHTGAYPWQWAPVDVEQYFADSRGRTKKPLSTRTLRQYSGSIGMFCSYATNPVYGWVEYCEATFGDVPSQIVFDWNSPRHTADDDVATSNRALTHSELQQLFDYIDDLVDSERAKGSKRWASLLRDSMAFKLCYAFGLRRRELAMLELSDFGPNPYIPQYGVFGALTVRWAKGTEGSGPRRRTVLTTPKFEWAVPLMQKWLSPGRRDQFRMADGSPSLWPSERRPRVGLSTFGNSFTRLREEAGLPENLGLHCLRHSYITHLLEAGYDPAFVQVQVGHKYASTTGLYTHVSSSFRQKELQRMLTKRAAQLTAGLGLDGTHE

SEQ ID NO: 4884 - protein, 527 aa, synthetic construct
  REGION 1..527: note = TnsF-Tn7 System Protein
MNTPPDHARPGRSPHRDVNEAATFVCARCQRPLRLPVRNRPVPPDSRGRVLVAVRRWPEGWICGGCYSKARETYGVCPGCGVDRLLPGLTQDGAACCTDCAGGIGDFTCTRCGNEGSNEYRGVCGRCVLGDRLAAHLDDGTGQIRPELVAFYDRIVAMHRPRVGILWLSKPHVPPILRALARGDVPLTHDGLSHLSPLKSVVHVRDLLIESGVLPPVDRHLVLFEQWLPKWLDQITDPAQRKILQTYATWSVLHRLRSAADNGPVGHYRDQNARHRLRVAAAFLEHLASCGVDLPGCGQADLDRWFANAADARKRASRPFLVWAIRTKRMQQLRLPPTREPVPKPISLRHRVELLRRIHAGDGMDLTERVIAMLILLYAQPLNRITRLTLDDISVDEDGQMLIRLGDPPAPVPAIFAAIITDYLAARPNLTTATNKNSTWLFPGRRAGQPLHPTSIRLRLSNLDIPNMPGRSRALREMLLQAPPAVVAGMLGYHTGKSEAIAAQAGTAYKRYAVGDHSRTRNPRLSR

SEQ ID NO: 4885 - protein, 527 aa, synthetic construct; identical to SEQ ID NO: 4884
  REGION 1..527: note = TnsF-Tn7 System Protein

SEQ ID NO: 4886 - protein, 364 aa, synthetic construct
  REGION 1..364: note = TnsF-Tn7 System Protein
MYEAMLEGWNNQMLARNLAPATIRNRVRQVRAFGEHAGAFPWEWSAQLADEWFADLRAIRHCSRSTVRGYQVAIRGFCDYLGDPAYAWTEECERRFGTHPIQVINEVNAAAHVAEVESEPTKRPFTRAELQALFDYADEQVEVKRRLGRKGWMSAFRDATMIKVAYAYGLRRNETRMLDVADFGRNPDGAEFGEYGVLYVRYGKAARGSAPKRRSVLTVWPWSVEVLEQWFDEVRPVFGTDENPAVWPSERAPRVGLEVINHRLASYRDALGMGPGLDFHSLRRSYVTHLIEDGWDPRFVQEQVGHNHASTTSIYTHVSSDFRTRTLRRVLDGMLNEALGGALTGALDGVLDPDVGTDGLGGLA

SEQ ID NO: 4887 - protein, 631 aa, synthetic construct
  REGION 1..631: note = TnsF-Tn7 System Protein
MANPFEKRATEYLADSEAFLAVVTPEPLMTFFKQPATDGTLYDRLAIVTGTPGSGKTTLARLFEYDTVRSLLRNRNVRTYRSLADALTQCGVLEDLTPKVLGARVPLESEYRDFWEFPYPEEIRMSLTTRLLEARSVIRWLRQLNESSVVLSEVEIVPRAGAEAALEQIGGRDGQAVLDRARDVERALYKIVRALVPPPLDSLGDAVSEAYHPFDVVETISFPWEGQRINAAPLAMFDDAHSLHPVQYERLERWLTQREMRVGRWILTRLDALNPARVLGQEGEPDVQKLRVTTEIRMQLTERRATRTAFRKMARDMSNRYLGQIEPFSRRGLTDFSDLLATEIAAPTEKRLGELAGRVGVVQRRVGASDSQRRELQAKVEGYLDRSSANTSDPALILAATAIALERFGKRTPQLALDVFSDEDLEPNKPITIDSSVIDGARIHLLHEWDAPYYVGFDALCDASSENAEQFLHLAGRLVTQAETQLVRGKRALLSAHDQHRLIRQRSTEIIEAWDFPHHREVRALTELMAKQCVDRSLEGNASLGGGPNAWGIPQEQFEALPDKHPGLARILQFAVAYNALVLKTEHSTKNRLWCLLELGGPVAVANGLTLRRGGFLERDVRNLIAGVEVA

SEQ ID NO: 4888 - protein, 631 aa, synthetic construct; identical to SEQ ID NO: 4887
  REGION 1..631: note = TnsF-Tn7 System Protein

SEQ ID NO: 4889 - protein, 125 aa, synthetic construct
  REGION 1..125: note = TnsF-Tn7 System Protein
MSPTPNKRPVRQRWKVSYQWRLREVMAENQMYATTELVPLLAERGIVLSASQVHRLVTSTPERLSLPILAALCDIFAVDAAELIPTEATSVGVRKVVSGDRPAPARVGELGELKPVRARIVRPEE

SEQ ID NO: 4890 - protein, 384 aa, synthetic construct
  REGION 1..384: note = TnsF-Tn7 System Protein
MDLLFADVDGVVPRRIQPVAEILASGNPWSVIPWLSRSRAAMILTELMRSGQPVTHELLDGFPQDVNLSYVRELFVSAGSLPSRTEHLAQLQLWIDQTIVALPPHQASTIKPFAEWDVLRDARQRSLRSRYTHAAATADRDVIRTAIMFITWLDTQSIPVNALTQGHVDLWLEIHPTRRNQIGALLRWLITRSISADFEIPKRHRTRPPRFLSEDELREQLRRCLNDKDLPLEVRVMGALTRLYALPLTRILELTTQQFHRDGDRGFLTLSVNPILLPPKLADMIEELIRSPGVSTFAATREDWGYLFPGRPPSRPRNVVGAGTMLKRHGLPTIHARNTAMIEAVTDLPAIIVSDLFGIHPATADKWVRLTQNSWADYLAGKSS

SEQ ID NO: 4891 - protein, 289 aa, synthetic construct
  REGION 1..289: note = TnsF-Tn7 System Protein
MYPLVRELAEDGIPVTVTCRVLEIARQPYYRWLADPVTDADLAEAYRANALFRAHKDDPEFGYRFLFYEARDAGQVMAERTAWRICSNNGWWSVFGKKRGKAKRPGPAVHDDHVQRNFTADAANQLWLGDITEHWTSEGKLYLCAFKDVFSNRIVGYSISDRMKSRLAVDALDNAVARRDFVAGCVVHTDRGSQFQSKKFVRALSRHHMVGSMGRVAAAGDNAAMESFFSLLQKNVLDRRPWRTRDDLRIAIVTWIERTYHRRRRQVGLGRLTPIEYETIMTTPATQAA

SEQ ID NO: 4892 - protein, 371 aa, synthetic construct
  REGION 1..371: note = TnsF-Tn7 System Protein
MNADAPGSARLFLADNVVHLDSAAGVFNAMLEGWRRQQSSRLLRARTVGPRLRLIQRVVEFTGDYPWQWTAADGEAFIDHLRSGDNPVRLSTARSYEVIISLFLEFLLDPRYGWAQACYERFGEAPQAVFHDGNSVRHKDEYEGDPRRRPLTYDEVQALFDAADARPSKIAGRGVKGALGAARDAAVLKVIYAFGLRRTETTQLDLVDLRRSRKAPQFGNFGTVMVRYGKATSGSAPKRRTVLLVPEMDWVVATLDEWITELRPRFSPGSHPALWLTERVGRISGRSINEAFVAAREDAGLDRHLDPHCLRHSYVTHLTEFGYPARFVQEQVGHSHGATTSIYMGVSNEYRNTLLEAALKTRLGDDWEGTS

SEQ ID NO: 4893 - protein, 107 aa, synthetic construct
  REGION 1..107: note = TnsF-Tn7 System Protein
MIKKMGYQWRLRDLMADRQMFQTSDLLPHLAERGISLSREQVYRLVTQPPQRLNMDALVALCDILDCTPNDLIEPQVVARQVRKTADEIVATSITPRRSIVRRPGSK

SEQ ID NO: 4894 - protein, 310 aa, synthetic construct
  REGION 1..310: note = TnsF-Tn7 System Protein
MHCGVLPHRDRHLLLFERWLADWLDVIEDPGQSQLLQRFATWQLLRKLRATAAKRPLGPGAVKTARAGLTPAAVFLTWSDARGRALSECTQADLDAWFAEDAISRRITTGFLRWCMDHHVMPRLKIPVIRTENPAPISQHGRITLIRRVLTSDDLPQAERVAAALVLLYAQPIRRLVRLTVHDVLADGPQAFLRLGDPPTPVPGPFAGLLQDYVRTGRPNRPGGTMPTSDWLFPGRRAGQPMDPATLGRRLSAAGIPTLHGRTAALRQLVLQAPPSVVAGMLGYHTVHAEALAAEAGSTWKKYAPGDHTR

SEQ ID NO: 4895 - protein, 88 aa, synthetic construct
  REGION 1..88: note = TnsF-Tn7 System Protein
MSRTRVRAEDLFCARCRRPVRIGAAHWPEGYICASCRDHALETYGRCAGCSVDRLTPGIAPDGGRWCTDCAGGLGDFFCERCGREAAR

SEQ ID NO: 4896 - protein, 310 aa, synthetic construct; identical to SEQ ID NO: 4894
  REGION 1..310: note = TnsF-Tn7 System Protein

SEQ ID NO: 4897 - protein, 449 aa, synthetic construct
  REGION 1..449: note = TnsF-Tn7 System Protein
MRCGRTRPVNKRGRDGEPDLCAACNWAPTVRCSRCDVEAMCRRSGGTGPPVCLRCTAMTRIDELLAGPDGHIASVFDGLRAAFAAASQPRSLHTWLDRSPGAALLAQLADGSLGLDHASLDQLDQTASVHHLRQLLVACNALPERDPQIALVERAIDRHGRSLSTSSRRVFQTYATWQHLARLRRRYPDGDTPPLATSGVQTRLAETARFLVHLDRSGIALSGLTQATIDRWIANRASARRRIGGFIIYTDRHGHTPPGLAVAVHDTPSTTTPLESDRRWALARRLLHDDTVDPADRVVGTLVLLYAQPVARIARLTLNDVHDHGDHLTITFGKDHLELPDPLAGLLRQLPWRRQTGPSGTVADADRWLFPGRQAGQHLHPSHLSRRLTALGIQARAARHAALLQLAREVPAAVLADTLGINVTTATRWAARSGATWSNYAATRVNNTP

SEQ ID NO: 4898 - protein, 449 aa, synthetic construct; identical to SEQ ID NO: 4897
  REGION 1..449: note = TnsF-Tn7 System Protein

SEQ ID NO: 4899 - protein, 116 aa, synthetic construct
  REGION 1..116: note = TnsF-Tn7 System Protein
MAPTIRQVGYEWKLRQVMADHGMFQTTDLAPLLAERGIELSAVQVYRLVAQRPERLNLTVLAALCDIFDCTPDVLIEPTVQTVTTRRRKTATSGRSGGESDGERRPVRARIARDET

SEQ ID NO: 4900 - protein, 264 aa, synthetic construct
  REGION 1..264: note = TnsF-Tn7 System Protein
MEGAQNHVSGAVTFLSWLDEHGLELGAVGQAEIDAWFAEGPFYTRRLATAFLKWAMSARLLTPATIPHRRELNPQPLTQQQRLDVLRRLALDDTIHPTARVSTLLMVLYAQPLLRVLRLTVDDVVRTDDEVHLRLGDPPVPVPAPFDAILADYLDHRRNLTTSNTGAAGSFPSINPGQLMTAAANTFADTDFPPSVGVPPHSNSSCSTRHPRWSRRCSASMTPISLRSPSRSASAGAATRPFARGIEAAPGALSAPGATLAQSW

SEQ ID NO: 4901 - protein, 358 aa, synthetic construct
  REGION 1..358: note = TnsF-Tn7 System Protein
MWADNETEMDLLGFDFLVDTLFVALTEPRLLPLTAGLLGDWGSGKSSLMRITRQELLKIRDDEESPSRYVCVGFSPWQYEDYDDIKVALMTTVLDAVGTRAVGDQQEQVSRLRRFAQGLGRWGRRGGRVAVADAQTAAPFVMQAMDPSIDPQVLDMSKAVVNAAAGEANKLLEDPKTKQAASGNDTAEAIIDAGRFRAEFAKVVTTLEDVDAVVVFIDDLDRCLPETVVDTFEAIRLFLNTPKTAYVLAAAQAVVESAIDSRYPQLRRPDGAGIGADYLEKMLQLKVAIPPLSAPEADTYVNLLLAELRLDDEQFAKVLDETRRRREAGNLQVAFNVGVAGAILGDVPADLRRSSTPC

SEQ ID NO: 4902 - protein, 358 aa, synthetic construct; identical to SEQ ID NO: 4901
  REGION 1..358: note = TnsF-Tn7 System Protein

SEQ ID NO: 4903 - protein, 395 aa, synthetic construct
  REGION 1..395: note = TnsF-Tn7 System Protein
MTRKRAIMQLMDAMFVAGAEVANVAEWCRINGVDRRTFYRHRARARVEGRWQPRSRRPRTTPHATPEPVVAEIVRLRHALAPDNGADFIRDELAEIAAVAGWAERGWRVPARATINRVLDRHGLLEPSPRKRPRSSWRRFVYARPRDCYQIDATETALADGTRVVVFDVLDDCTRMLVACQAAASETTAAAIDAVTAAFTEFGAPGIVLSDNGSAFTGRNRHDNAGPTRFARTVTTAGTRLIHSSPYHPQTCGKVERHHQTLKKWLNRRPAPASLPELQALLDLYRDHYNTRRRHSAIGRVTPRHAWDHAPVHAGPGNLPVQTDATVHELKVSTQGIVNLGKQIRLRIGPEYVGQPITVIRDGDRATAYTSDGNPIGHLHIDHTKTYQGTLTPAA

SEQ ID NO: 4904 - protein, 496 aa, synthetic construct
  REGION 1..496: note = TnsF-Tn7 System Protein
MTTSEPKRRNTVRGRPVVADGRLECARCHRCMRKAAASWPDGKICNSCYYTATSLRGRCSRCGTERLLPGHVDDEDTPVCRDCAGIVQSFVCRTCNTEQRPYRRGSCARCALRHDLERDYLRGDAPDGFRTLVDTLCRADRPESILTWKRSEKVQALLTALATRATPITHDGLDGVAPHGGHVDHLRAILVHAGVLPPRDTRIARFGEWIDNRLACLSNPQITRPVRQFATWHHLKRIGDMVAAGKPIRGAVDTSKQEINEVLKFLRWLDSEHDRTITTCTQQDVDQWIATGTTTRHAIRTFVIWCAATRINTAITLGFREAKTTRILTQQQRLAWIRELLTGEGESLPYRMVGLILLLYAQPVVKIVETPLSAIATTSGASTIAFGATPSPALEPFASLLREHITQRPHLRTTGADNPWLFPGSRPGDHLRPDTAVRRLRRLGIDLLGARNAALRDLVSQVPPPVVADMLGYSDKVTHHHADLAGQPWHAYPARA

SEQ ID NO: 4905 - protein, 496 aa, synthetic construct; identical to SEQ ID NO: 4904
  REGION 1..496: note = TnsF-Tn7 System Protein

SEQ ID NO: 4906 - protein, 706 aa, synthetic construct; identical to SEQ ID NO: 2290
  REGION 1..706: note = TnsF-Tn7 System Protein

SEQ ID NO: 4907 - protein, 516 aa, synthetic construct
  REGION 1..516: note = TnsF-Tn7 System Protein
MEILEAYDATGSAHSAAQLAGVDPKTVRRYVAARDAGMPVTGTARRPRIIDDYLPKIEEWVERSKGRVRADIVHERLVELGFDGTERTTRRAVAQAKTAWQAGHRRTYRPWITEPGLWMQFDWGAGPKVPGPGGIVRSTLLFCAWLAWSRYRVVIPVWDQTLPTLIACLDATVRRFGGVPTYALTDNPRTVSIDHVAGIAVRHPQIVETARHYGMAVHTCIPFDPESKGGSEATVKIAKADLVPTEANLLPEYASFTDLEAACDRFCVTVNARRHRESARIPAEALAEERARLHTLPSAPHTLALGTTRSVGTDQTIRFGSVRYSTPPGLVGAEVWVRAAGADLVVVADLDALPRIPDWAAGRCGLSEVARHRLSTPGNPSIDPAHYPNHPQEADGAPRPPRPRARSAAEARFLDLGPGAHTWLIAASAAGAARIRAKMTAAVELAAFVGADTVSAALAVAAGAGRFAESDLPAIVAHHTDTGAGAGRVVADETHSVQPGTGAWAGFGTARTEARS

SEQ ID NO: 4908 - protein, 256 aa, synthetic construct
  REGION 1..256: note = TnsF-Tn7 System Protein
MNPTAPPLPDDLLAVLKRMRLPYLRAAAPEVLATAKAQRWDPTEVLKVLLTEEIRGRDEATRAMRRKAAGLPAGKTFSSWREEDSSIPVPTQSALAALEWVHRAENLAVSGPSGTGKTHFVEALAHAVIDAGMRVSWFTLESLTAAIGRAAVDGSITKTITKITRAELIVVDDIGMLPSGQAAAEAFYRLVDAAYERRSVAVTSNLHPSGFDTIMPKTLATAAVDRLLHHAHVVITEGTSLRLSEATAGRGVVPLT

SEQ ID NO: 4909 - protein, 256 aa, synthetic construct; identical to SEQ ID NO: 4908
  REGION 1..256: note = TnsF-Tn7 System Protein

SEQ ID NO: 4910 - protein, 111 aa, synthetic construct
  REGION 1..111: note = TnsF-Tn7 System Protein
MKRDVDYHWRLAELMAGHQMHNSTDLIPHLHERGITLSRPQVYRIVHQRPERVSLKLIAALCDIFGCGPDDLITVTAANARKTAAGTAGKNVVELNKTIRPARARVLGDNE

SEQ ID NO: 4911 - protein, 420 aa, synthetic construct
  REGION 1..420: note = TnsF-Tn7 System Protein
MTSDCADCGTIPKGRRGRRPVCMPCQLNRRLARLLHNGTEAPASHLAALADHLRADPDPEKLLHWLSRCGPAELLTALANGSLDLTHDALRAWPRPIPARHLQHHLVACGLLPPVDGHLLRFESWLHRRLDRLTDHPHERLLRRFALWHQLPRLRADATARPLRATATTYMVNQFNTAHAFLDWLHTRGIAPDAVSQTDLDTWAVTAGAGHRHTIRGFFIWATHTSAMPRHLVLTPVKFTIGAAITQQQRLALLRHYLTNQAPLRERAAACLMLLYGQPISRIHRLHNNDLELSGNAPTIRFGDPPTPIPEPIASLLRDLAAAAPAEGWLFPGRHPGQPITYQTLHRNLRMLSFPLNQARVSALRQLVAQVPAPVIADALGIHHTTAARQAVNAGMTWSHYASGNHSPLPPRSPRARNRA

SEQ ID NO: 4912 - protein, 420 aa, synthetic construct; identical to SEQ ID NO: 4911
  REGION 1..420: note = TnsF-Tn7 System Protein

SEQ ID NO: 4913 - protein, 112 aa, synthetic construct
  REGION 1..112: note = TnsF-Tn7 System Protein
MKRQVSYTWRLRNVMADHNMFNTTELVPLLAERGITLSASQVHRLVSGTPERLSLPVLAALCDIFDTTPADLIVTSAQNLAPRRLAAASDSSTSPGHPDAIRPRRATLRPAP

SEQ ID NO: 4914 - protein, 784 aa, synthetic construct
  REGION 1..784: note = TnsF-Tn7 System Protein
MGRRRVDDARRDLRERLLHEVVTLTAAELEAVIAEARVDMPRTVHQLDRYLRESPEGLVAPDEFCPAGLMRLTHVLVRHGHAVSPPACPRCHRRVLLPHQRPEGRVCENCRTIDRPRITCTGCGRTAPPAAHYGDDRLCRRCYRTDPRSRRACSRCGRTRMLEHRTADGRALCARCAPRPHHICIDCGRSRPAQTVLDAGPVCAACYRRHRPRRPCGRCGAEAIIVARADSTHPDMCAPCWQATSRPPRQRKSAPSRRTPPPESGRARRPRPTHRTSEPARQPSRRPGSSAHPAPCCLCAQIRRVTAYWPIGPVCRSCYTRRQEHPARCARCHESRVLIAHSDSGDDLCGPCSGSSFDYRCRRCGEGGRVYTAGHCFRCCVDTRLQQVLGADRGAVPEQLVPLAEALLAAVKPRSVLVWLRTSSAAQLLSQLEAPITHAALDALPPGRDVHFLRPMLVQAGVLPERLEYLDRVVPWLDAQLASHNDAHARLVRPYAQWHLLHRARLRARRRGGGDSADAAYRLRYSLRVALEFLTWLDHHQIAIDSLTQHQLDGWLVGGNGSRRYHVRGFLKWAIDKNLAPSVLDVPAPKVGQPKHFLDSADHDRQLRRCLHDPGIPTDVRAAGALILLFGLRMAELLTLRKDQVRARAGDHYLHLGHHELLLPPAVAALLGDLPRTDTNRSVLVPTDHATVLLFPGFHSTRPPATTTFGARLLHHGITPLPGRNTALATLAADLPAAVLADLLGLHPRTAVRWVRIAKRDWHTYLAQRRADMTPHENGSPPAG

SEQ ID NO: 4915 - protein, 784 aa, synthetic construct; identical to SEQ ID NO: 4914
  REGION 1..784: note = TnsF-Tn7 System Protein

SEQ ID NO: 4916 - protein, 361 aa, synthetic construct
  REGION 1..361: note = TnsF-Tn7 System Protein
MALAANVLHLDPETAVFESMLSGWQDQQRARFLRTATIEQRVSVIRRFCAFTGLYPWQWTPAESEAWFADLASGLQPKSFATVRGYQISLRMFCGYVTDSRYGWEKVCADRFGAVPVQVLHEWNTVSHIGVFEGRPGRRALTYDEVQMLFDTADGEVERIRNLRRKGALPALRNAALLKAVYAFGLRRSEAVGLDLADLRVNPSACDYGRIGGVYVRWAKSARGNPPKRRTVLTVPEMDWVVESLDHYLDRVRPLFGAAAHPAVWLTERCGRISVRAANEAFSDVRDAAGLPQELDLHSLRHSYITHLIEFGYPERFVQDQVGHSYASTTALYTHVSDEYRNRLVRRALTNRDLGLWEGAT

SEQ ID NO: 4917 - protein, 108 aa, synthetic construct
  REGION 1..108: note = TnsF-Tn7 System Protein
MIKKMGYQWHLRRLMAERGMFQTTDLSAPLAERGMTLSREQLWRLVSQPPQRLSLDVLAALCDILDCGPGDLIEVRAENTVVRKSGTGPTGPAPAVRRTTIRRPHPKA

SEQ ID NO: 4918 - protein, 360 aa, synthetic construct
  REGION 1..360: note = TnsF-Tn7 System Protein
MNSGRESSLANWVKRSSSAALIRLYVTNETPLTHESLDAWPSKQTATHVRQLFLATGLLPAREETLRRFDIWTLDYLIAQPGPHHQMLQRYARWHVSPALQNKATRRPLRAGSTSYARQQIRTAARFLQTLPHDVPATGHVQFLIEDYVLEHPRERDRLVDFIRWTQKHNHLPHAELAYTAMQHPRVALAESDYWAAISTLQTDTSISLRARVAGLLVGLFGQQLTRIVQLTADNIYENDGAVQLLLGADPITLPHTLAQLVTKLRNTRPPWTAEAPDRWLFPSKFHPNRHIHLHTIADDLRKHGIYTIPLRGASLTNLAGHIPIGPLCDMTGLSKAAAIRWADVAGRSWNAYPQLRTEH

SEQ ID NO: 4919 - protein, 404 aa, synthetic construct
  REGION 1..404: note = TnsF-Tn7 System Protein
MITLEDWALIRRLVADGVPQRQVAKDLGVGRSTVARAVASTSPPKYERLEQPTTFSPFERRVRDLLAEHPQMPATVIAERVGWSGSITWFRDNVRRMRPEQRPVDPADRLVWEPGDAAQCDLWFPPAKIPLEDGSAKLLPVLVITPAHSRFVLGRMIPTRKTEDLLLGSWELLQQLGRVPRRLIWDNEPGIGRGPRRAAGVAEFMGMLATRLVLLKPRDPESKGIVERRNGWFETSFMPGRTFASPADFNTQFADWLQLANSRVVRTVKARPVDRLDADLAGMLPLPPVALQLGWRNRVRLGRDYYVRVDSNDYSVDPTAIGRLVDVTADLERVRVRLGGRVISEHARVWARGSTITDPAHVATAKVLREQFQRPRAIADNDDLTRDLADYDRAFGLTGTEAAS

SEQ ID NO: 4920 - protein, 360 aa, synthetic construct; identical to SEQ ID NO: 4918
  REGION 1..360: note = TnsF-Tn7 System Protein

SEQ ID NO: 4921 - protein, 392 aa, synthetic construct
  REGION 1..392: note = TnsF-Tn7 System Protein
MITHPICLGGLIFKRRYGLIFERRRQSGTAPGRFAPVILLDPARSMFEEMLTGWERQQFSRGLAAETVSSTVGFMRRFGRWTGDYPWHWKPGDVEDFTSALLTMQPPRAHSTLRGYHQRIKTFCAYLIDPRYDWGRRCEEAFGTHPIQICHEWNTRTHLSEFEALPVKRPLSYDELEAFFSHADSLVETIITSGKKGALSALRDAQLFKTAYAFGLRRTEVAMLDLADLRSNPNSPQWAGYGVLHVRFGKSFKGGPPRRRSVLAVPEFGWAIEGLKQWVEQARPKFLAHQTNALWVTERKGRVSIRHLDNRFAAIRDGAGLDKNLTMHSLRHSYVTHLVEYGYPERFVQEQVGHSYASTTAIYTSVSNDYKNRILAAALARVYGPTPKGLPS

SEQ ID NO: 4922 - protein, 264 aa, synthetic construct
  REGION 1..264: note = TnsF-Tn7 System Protein
MTTGKTTSDAVKEITYLAAALKAPRIIEAATRLADQARDAGWTHEDYLAAVLEREVSARNASGAELRIRAAGFGAKKTIEDFDWDVQPAIRQQIGALASGGFLTEARNVVLLGPPGTGKTHLATALGIVAARHGHRVLFATATDWVTRLTDAHRQGRLPAELVRLRRYGLIIVDEVGYLPFEQDAANLFFQLVSSRYEHASLILTSNLPFSSWGGVFGDQAVAAAMIDRIVHHADVLTLKGASYRLRGRGIDSLPSIRTQEPAD

SEQ ID NO: 4923 - protein, 264 aa, synthetic construct; identical to SEQ ID NO: 4922
  REGION 1..264: note = TnsF-Tn7 System Protein

SEQ ID NO: 4924 - protein, 110 aa, synthetic construct
  REGION 1..110: note = TnsF-Tn7 System Protein
MTGPYTVTWNLRQLMATRNHFKTTDLVPLLAERGVALSREQVFRLVTQTPIRLNLDVLGALCEIFTCTPNDLIHIDRTASANQETVNDSGPSQPIGNLRPVTAIIRRPSQ

SEQ ID NO: 4925 - protein, 488 aa, synthetic construct
  REGION 1..488: note = TnsF-Tn7 System Protein
MSLGSKRRCDSCGRDVKARYEILEQRICNACYSRLCRNAAPCPLCAQMKVLAFRSGDGQIVCAACAGVPSRFGCDRCGSEEHLTGSHCGRCRLEDRLDDVLADANGCVHPLLVPLRNHLLSARDPRTAVRWLRHEPIDRTLRAMARGAKSISHDTLNELGQSTRIRYFRRTLIAAGSLPEIDVRLNDLELRSRALIEALPAEHGVIITRFFNWETLRKLRRRPLDSPISVGVANARTTELRKIAAFLAWLGENNLKLPTLNQVAVDRYLAHHDPNLIIGRFLAWVVRHRITQHLDVPRAQSTASPATIAEDAIWEKVDVLLQDDSTPMSSRIIGLFLLVFAQPIRDSVRLRRDDVQSTGVNVKVQFGSTPVVLPPPVAELLVRFLDDTCDRPPYAGAPPGWLFEGVMPQQHLSDASVRFNLAKHGLHAREIKRARLDHLVQVLPASIVADITGVTVNTALRHSSNTRADWGIYPELRTRECKELDLSE

SEQ ID NO: 4926 - protein, 488 aa, synthetic construct; identical to SEQ ID NO: 4925
  REGION 1..488: note = TnsF-Tn7 System Protein

SEQ ID NO: 4927 - protein, 370 aa, synthetic construct
  REGION 1..370: note = TnsF-Tn7 System Protein
MSSGHGGATALRLLGNVRPLDEKPFVYDAMLAGWSDQQSSRGLAASTIYSRVLVIRRFEAFTGRYPWEWSVGDVEDYTTNAKSGTRPAARSTIRAFQAIIRLFCDYLCDGRYEWASECERRFGQAPQQICYEWNTAAHIVDYEGRAQRRALTYDELEQFFVAADARVETILRQGRKGALAALRDAQIFKTIYAYGLRRAEVAGLDVADLRPNGATPRFGRFGAVEVRWGKGSRGSGPRRRSVLTIPELGWVTEGLAQWVDHARPRFTDEPGMLWPTERRSRVSVRYINSRFADLRDQLGLPPELSVHALRHTYVTNLIEWGYSEKFVQDQVGHAYASTTAIYTSLGDDYKTRMVTRALARIYGGNDADNR

SEQ ID NO: 4928 - protein, 115 aa, synthetic construct
  REGION 1..115: note = TnsF-Tn7 System Protein
MPTTADHSPIAWQLRQVMAAAGMFQTTDLIEPLREQGVQLSREQIYRLVSKTPERLNIEVLAALCRILDCTPNDLIEVAPVATARVPRAVGEPRSSGPSIGTLRPIPAKLRRPPE

SEQ ID NO: 4929 - protein, 370 aa, synthetic construct
  REGION 1..370: note = TnsF-Tn7 System Protein
MKELLGQNIAVDHAALDTFDEREVWSLRRSLVDLGALPERHEPIARLDALLAKKVAPLPTEMHQLVHTYGSWWLLRRSRQRFERTGKFTYNSFRAIWNRLDQVIGFLSWLADNGIPLDALDQRTVDTWLADPKKDARAVSDFLRWASRHHLAPRLTTTGSPDREPAAGMTEQQRWAELSRCLTDDSIPDDVRAAGALVLLYGLQLAQVMRLTTDHLHGDKTRPGKTIEGFSVHVGGPFILVPPALGLILDRLPATPATRGRSLITANPEGPSWLFPGRGSSGHITYTGLATRMRKHQLRVRPARNTALISLAADLPAPVISDLFGISIAASVKWTRRAGRDWQGYISALRQRERRTHDQRIRNPYAGELG

SEQ ID NO: 4930 - protein, 577 aa, synthetic construct
  REGION 1..577: note = TnsF-Tn7 System Protein
MLITLVRSYLRPYAPLVTVVVVLQLASTIAALFLPSLNAQIIDEGVAEGDTEYIWSIGMVMLWVSLVQVAAAIAAVFFGSKAAMALGRDLRKSVFHRVSGYSAQEVSHFGAPSLITRGTNDVQQVQMLVLMGLNFMVAAPIMCIGGIFMALREEPALSWLVWVSVPALFVVVGFLVWRLMPLFRTMQVKIDNINGVLREQITGIRVVRAFVREPYEAQRFGRANRELTNVSLAVGSLFVLMFPAIGMILHLATAAVLWFGGIRVAAGEMEVGALTAFLQYLLQILVAVMMGTFMAMMIPRASVCAERIGEVLDIEPSIHETDRPLQPASKAGVVEFRGVTFAYPGAEEPVLKNISFTARPGQTTAIVGSTGAGKSTLISMLPRLFDVGSGQVLLDGVPVTDMARPDITDRVALVPQRPYLFSGTIAHNLRFGNPNAHDDDLWDALTVAQAADFVRAKDHALQAPVSQGGTNVSGGQRQRLCIARALVAEPKVYLFDDSFSALDVTTDSRLRAALKSKTRDATVIIVAQRVTTITEADQILVMENGEIVARGTHEELLETSPTYQEIVESQTTAEEVA

SEQ ID NO: 4931 - protein, 577 aa, synthetic construct; identical to SEQ ID NO: 4930
  REGION 1..577: note = TnsF-Tn7 System Protein

SEQ ID NO: 4932 - protein, 379 aa, synthetic construct
  REGION 1..379: note = TnsF-Tn7 System Protein
MSTFDSNAGAVAPLALVKELGLLDPEVAVLDGMLDGWALQQRARFLKPDSIRRRMSIVRRMVDFANQYPWQWTAAEIEAFIVSLSNGSAPIAVSTARSYLGDLRMFLEYVTDSRYGWSQVCIERFGEAPKQVLDEWNTVVHASEYEGRPGRRPLTYDEVQQLFDAADDRVDRARAQKRKGVLSAHRDAVILKTVYAFGLRRREAWGLDLADLRHNPKVPAFDQFGALMVRWGKSARGGPPRRRTAMLVPEMDWVVPVLRQWLDEVRPRFDPGKHPALWITERRGRLDWRGINAAFVAARDAAGLDPTLDLHCLRHSYVTHLVEFDYPERFVQEQVGHAYAATTAIYTGVSDAYRNTLLRRAISAHQPDLWRTEKGDESP

SEQ ID NO: 4933 - protein, 105 aa, synthetic construct
  REGION 1..105: note = TnsF-Tn7 System Protein
MGVEWNLRLRMAERGLFATTDLVPLLAERGIHLSREQVYRLVTSAPQRLSTDILAALCDILSCTPNDLITVVKVDAQVAKRSAAGGGSASSPPVRRTTIRRPNLE

SEQ ID NO: 4934 - protein, 382 aa, synthetic construct
  REGION 1..382: note = TnsF-Tn7 System Protein
MVELLAHYDNPYSLCWYLRRPGGQLIRRMVTGELACSHEALDELRQTTEVQHLRGLLVLAEILPPREEELAQLARDVQLVLARVVHQQDKIVLARYIRWHLMPLAYQRAEQDSGFTRYQREHLRRQMEAARLLLGHVRNRGAQLATLTQPLVDRWLIRNRPRQPYARPFLLWAASTGLAPEQVAIGTSARTGDREVMSDAERVLLAIRMESEESLALADRVAGCLVLQYGQSSGRLVNLTTDHVLVHPDEPDVLGLRLGRDPLWLRPRLSALLQRLVDDRRPLAAALRHRPTPFLFPGLRTDKPMASATLQARLRKLGVPSTRTARNGAWLALVGAVHWKMLADLLGVADSTASAWHKENGGDRASYVASRLRQPQRQHGPE

SEQ ID NO: 4935 - protein, 382 aa, synthetic construct; identical to SEQ ID NO: 4934
  REGION 1..382: note = TnsF-Tn7 System Protein

SEQ ID NO: 4936 - protein, 410 aa, synthetic construct
  REGION 1..410: note = TnsF-Tn7 System Protein
MVSRLRKPGGGDAAVAGLATLHVVPGVPMLRPAEAAFEKMLTGFAQHQRARRLSMDTIKERERVARQVQTFADAYPWESSWNRALFDRWSAMLADSKAASTMSSYQLHLRHFLTYITDPAYEWPQVCLELFGTFPANAIRDLNSVRHSQEYMGRPSGNRPLTRTETKAFFGQMDPEIRRLQAEGHKGALAAARDLALFSVVYGWGLRRREAARLETHDWRRQAKLPEFGDHAALAVRWGKASAGQPPRRRTVISVWPWAVQTVQFYMHDIRPLFYVDRDDDGVMFPTERGEMISLRSVNDRFKHWRELAHLADYLSPHCLRHTYVTRLIESGYDAQFVTDQVGHSHAATTAIYTAVSSDFKNLQVRHALDAAEEDALRRACAQAEAEADMDDAFDDQEPPRSSANRRKAR

SEQ ID NO: 4937 - protein, 663 aa, synthetic construct
  REGION 1..663: note = TnsF-Tn7 System Protein
MSTTTGAASPAVLAQIVAACQAVDPGLTDSILIATAHAAGGPKALIRFARELAATPDLLISGASMASPTAQRMITGLRTQGFLTFQLPRCAGCGRTVRLAHHDGRGGKICDRCVRAARTPACTACGRRHRSGYRVLGGRPFCPPCFADDPRSHETCSRCGQMATPEARDAAGPICRSCYQAPCVPCAMCARHRPVAARHDGGPACPSCHDGLRRRPRTCTGCGQRRIAPHLSTQGPMCPSCAGNTSSAGRCAQCGDDQHRLHGRLCARCMVPGKLRALISDDHGRPHPQLLGVEAYLLRNQDNAEAVLSWIRRSPMSRVIHDMAVGTTPISLRVVAELPATGATGYLAALLMESGVVPAENFERLRLEAWERDFFATFPDPSTRSLLHRYAAWVVNPRFSAPAGTGAGDDGRRLQASKTHLHLVAAFLDTLQNQGWELTTVPQRIFDNYVAGHGRAGLELTPFIRWARTQHLTRLRSDYLQSHPRGPVISEDQRWAWVAELLHTEELPLPARVSGLLVLLYGATLTRLVSLPREAVTLEDTTTWITLGTDPIQLPDKIGRLLRRLLDTATPHVGEGSTWLFPGARPGRHLTTAALTAPLARRGINLQAGKSAALITLAREVPPSVLADLLGLSLEATTRWSALAGHDWTSYPVTRLMATDSPE

SEQ ID NO: 4938 - protein, 336 aa, synthetic construct
  REGION 1..336: note = TnsF-Tn7 System Protein
MTHVNAPLTPTGRLRMVLRHLDDGIPKAHVAAEFRVSRPTVATWVARYLESGEAGLTDRPSTPRHSSTRTPAAVVDLIETLRRGRKWSARRIHRHLADRAVAISLRTVGRWLHRLGISRLRDLTPAGENSRRAPGRIRAAWPGHMVHLDVKKVGKIPDGGGWRAHGRGSTAAKAAKRGPGAKVGYTYLHSAVDGFSRLAYTEALDDEKAVTTIGFFCRARAFFAAHGIRRLHRVVTDNGANYRARDFTRCVEALAGRHQRIKPYTPRHNGKVERYNRLLADEVLYARPYSSEQARRDAIGVWVNHFNYHRPHTACGDHPPATRVPAPANNVMPSYI

SEQ ID NO: 4939 - protein, 337 aa, synthetic construct
  REGION 1..337: note = TnsF-Tn7 System Protein
MLGSWGQQQRSRGLTEDTVTGRAGVVARFADFAGTYPWQWQAADLDEYTSVLRTRGLAVSTIRQMHGTLSVFCDYLIDPAYDWVQICESFFGDTPSQICLSWNTTRHLQDYEGHPGRRALTYEELQHFFDHADSKVEAAVAQGRKGALAALRDAQMFKTAYAFGLRRAELRGLDLADLHFNAKVPQWGQYAALHVRWGKAAKGATPRRRTVLLVPELAWWIEGMRQWVEEGRDLFAPGELAAMWPTERGARVSVEYIDRRFTALRRELGLDPALKLHCLRHSYVTHLIEYGYADRFVQEQVGHAHASTTAIYTSVSGDFKNRILAEALRRFNTLEDS

SEQ ID NO: 4940 - protein, 112 aa, synthetic construct
  REGION 1..112: note = TnsF-Tn7 System Protein
MSPRVETIWHLRRIMAEHGLFKTTDLLPLLERYGVHLSREQVFRLVTRTPERANLTVIAAVCAGLGCTPSDLIEVRIVEEKAVATEQTRTSLGDLRPVPARIHRPPQTPPNP

SEQ ID NO: 4941 - protein, 297 aa, synthetic construct
  REGION 1..297: note = TnsF-Tn7 System Protein
MVAFEQWLENKLADGPSYDPLGLLKKFSVWHHLKRLRAISENRPLPEGTMAAARQEITVAANFLEWLHIQGKAAGECQQADIDLWLSTGPTTRSLARTFVRWCISKQHIPSVNFPYRIARTTPMLSNDQRITHLRKLLESSDIDLYICVAAVLLLLYAQPVTRICSIRMDEVSISVDGLEIRFGKDWVPVPEPFAELIREYASNRPNMNTASNPHSNWLFPGYAPGKHMHAQSVMRGLRKIGINLQGARNSALRELVLEVPPAVVAEMFSYHAATAERHAQAAGATWSSYPALRDDG

SEQ ID NO: 4942 - protein, 297 aa, synthetic construct; identical to SEQ ID NO: 4941
  REGION 1..297: note = TnsF-Tn7 System Protein

SEQ ID NO: 4943 - protein, 240 aa, synthetic construct
  REGION 1..240: note = TnsF-Tn7 System Protein
MPRTSEVEVRYVQDDGGPVATTIAAVDLHHVVHGLPVRRVQSHHRRRHYAGMFWSATNHGHVPYESRLELDRLWVADFAAPVVRIAAQPMWLCGLDGKRRRRHVPDLLLAHADGRFTVVDVKPEQFARRDEVAQVFSWTGRVCGARGWSYEVWTGSDPVILSNIRTIGAARRTGSIDAETAANLEAVAATGMTIDEVVTAVNSPRARIAVLAKLWSGMWTVDLSIPLSGKSVLTCAEGSP

SEQ ID NO: 4944 - protein, 380 aa, synthetic construct
  REGION 1..380: note = TnsF-Tn7 System Protein
MAHDRSVPPGSANLHLAHNVPLLHPEELVFQAMLSGWERQQLARNLSLGTIQSRIRVINRFRDFCDGAGPWVWTAVQADDWSAELRSITGSAHNTVLGYEGAIRQFMAYLLDPAYGWADECMNRFDTHPVQIFHEGNTARHVQDANSDPRKRAFTVDELQDLCDVADDQVALKVAAGRKGWTAAFRTATIAKLAYAWGLRRNEVRMLDLTDFGHNPNAKTFGQFGVCYVRYGKASHGSAPKRRSVLTVPEYEWVVDCLRQWIEDIRPMIAEPGNPALFPTERSDRISKVTISSNFSHLCDLADLSDPGLDFHSLRRSYVSHLVEHGYDARFVQEQAGHEHASTTSLYTHVSSDYRTRVVSNALNKMTSQVAKNLKAGGSS

SEQ ID NO: 4945 - protein, 84 aa, synthetic construct
  REGION 1..84: note = TnsF-Tn7 System Protein
MPPLQELGIDLSASQLYRLLGRKPERLPLPLLGAICAVLECTVEDLCAFRVEATSSRRAAAAGQVVGLDRSVRPKRAHIRRPGE

SEQ ID NO: 4946 - protein, 650 aa, synthetic construct
  REGION 1..650: note = TnsF-Tn7 System Protein
MRRRSGHRDLAAARARLVAAVVAVAGPPMTATRAEELLRRAKAWAAGNACDLADHLAERPHAFIDPSAHSLHCFVRLLRLLDSEGFGEKVVQLGCVRCGKIKALPRLVAEGRCCVLCVARTQQRLCVRCNKVGIIVAHRDDGAVCTNCYSRENVRRMECAGCGTVRPIRRRKSDGLLLCQECSTPVDACAYCGQVRRIAARTPKGPACRNCYRPPPRLCGLCGNLTPIHSRAKGNKPDICYGCYRNAGECVVCGKTRRGAKVGGQAFHCATCWPRKTETCAICHNDDVVGARWPLGTVCRRCYKFRVNQPSPCSSCGQARVLVGVENGGGLCTTCCGLELNFTCRRCGSDGRLMVDHTCMKCVAAERARNLLSNDTGTVIPQLQPLLDALAGANPGSVIAWLRTGQSRKLLSQLVAEHREITHTALDELPQRHATHSIRALLVGAGVLPTRNEPLAQLELWSERTLTQLPRSQQHIIRPFADWHVVRDARRRAARGPYRVGAASADRTQIRAAIKFLTWLNAQGAGIENLSQDHIDGFLLSHPSKSHPVIVFFRWLQARGLATGLDFPTQTSGLPNDFQGFEAHQQQLHRCLTDESIPLEARIAGALIRLYALPLVLIVEFTTDRFHRDDTGAFLTIDRHPVCFRQPWLA

SEQ ID NO: 4947 - protein, 209 aa, synthetic construct
  REGION 1..209: note = TnsF-Tn7 System Protein
MTPIAPGSAHLMLVDNVVHLDPAPAVFAAMLEGWRRQQSARFLRVSTIGPRIQLIERLVRFSGLYPWQWTAEEGEAFIDHLRNQQRPIKVSTARCYEVEISLFIEFLRDPRYGWGRVCEDRFGEVPQPIFHEGNSILHKTDYEGDPRRRPLTYDELQAFFDAADARPGKIIARGVKGGLSAARDAVVLKTIYAYDPFSGAPAACISAIL

SEQ ID NO: 4948 - protein, 650 aa, synthetic construct; identical to SEQ ID NO: 4946
  REGION 1..650: note = TnsF-Tn7 System Protein

SEQ ID NO: 4949 - protein, 109 aa, synthetic construct
  REGION 1..109: note = TnsF-Tn7 System Protein
MIKKMGYRWRLRDLMADQQMFQTSDLVPLLAERGIVLSREQVYRLVTSAPQRMSMDTLVALCDILSCTPNDLIQPEIVNQQVRKTADGRPSAAAPIAPRRTVIRRPGRS

SEQ ID NO: 4950 - protein, 374 aa, synthetic construct
  REGION 1..374: note = TnsF-Tn7 System Protein
MPDDLAPLATVLCEAANPYPVLAWLRRSRAAKTLARLAEQPEPFTHQLLDQLPQNAPTRHICGLLVTAGILPRRDEHLARLQLWIHQHLPGLPSHQAALIRPFAEWQVMRDARHRSARGRYTLAASKTDIREIRTAIRFLTWLDQQQLTAATTSQADLDLWTTRHPATHRPLASFIRWLRARRINTDLDLRPEQRAFAATFLTEDDYTRHLHRCLTDETLPRDVRILGALTLLYALPVSRITELTTDRYHRDDTGAYLTLGRHPVLLPPRLAQLIEAQIHQPATGRFRALLDDGTHYLLPGQAPTRSRNPLGATALLRSHDIPTLAGRNTALLEAVSQMPPIVVADLFGLHPQTATSWARHANDSWTHYLAARQ

SEQ ID NO: 4951 - protein, 374 aa, synthetic construct; identical to SEQ ID NO: 4950
  REGION 1..374: note = TnsF-Tn7 System Protein

SEQ ID NO: 4952 - protein, 372 aa, synthetic construct
  REGION 1..372: note = TnsF-Tn7 System Protein
MLVADEAPGSARLVLARNVVHLDAAPAVFQAMKEGWARQQLARFLKPETIAPRLRLIERLWEFTSLYPWQWTPTDGEAFIAALRGGPAPVRMSTARSYEVIVTLFTEYLLDVRYGWAEVCLERFGEVPREVFHEGNSVLHTVEYEGDPRRRPLTYDEVQALFDAADARPSRIRGQGRKGGLTAMRDASVLKTIYAFGTRRTESSRVDLVDLRRNQKAPQYRSFGSMMVRFGKSAQGAPPKRRTVLTVPEMDWVVDVLEDYIGSVRPHLSPGRHPALWVTERVGRLAPRSINEAFVAAREDAGLDPELDLHCLRHSYITHLTEFGYPARFVQEQVGHSHAATTAIYMGVSNEYRNTLLEAALRNRLGDDWDEV

SEQ ID NO: 4953 - protein, 1357 aa, synthetic construct
  REGION 1..1357: note = TnsF-Tn7 System Protein
MDSTLKAVAQVLGQRDEVCGAGFLVAEDMLVTCAHVVRDAGSEPGGLVRLVFPYVDGMHPVEGIVLEEPWRDPESEDVALVRLGAAVPGTLVPPLGTAAGSRGHKVHSYGFPAQAPAGGHHGYGVAGDLLPATEHRGEHLQLTDANDLTTGFSGSPVVDELTGLVIGMLTEITDPDVHERGQGIAYATPVQALREIWPALTEQDVCPYRGLEPFTAEEARWFEGRKDAVRQVLASLAGHHVTLLVGPSGSGKSSLIQAGVLPALAAGELPGSDQWLPVLLRPGQDLWAGLEHAGLPGAGVDGIVEAVARRLAAQPGHQRVVLVIDQFEELLTQPGRTHAAGRLTAAITSHAALSVILVMRDDFYPQLAAVAPELLEAAMPGLLNVPGTLGRDDLHDIITRPAHNVGARFESGLPEQIITDVLATAPEGTADRRAPVTVLPLLELTLSELWGRRREGRLTHDAYRRVGGVTGSLTTWCDAALAQLPPDRQPIAQRILTSLVRPADPRNNIPAIRAQVPLRDLRELAAGPAGGPDDGEAVDTVLAVLTRHRIITTRTPAGPSAQPVAELIHDALIRDWATLREWVSEDRRFQEWFARTREQQARWADGNNQEDLLGGTALAEGLDWAQQRRLPAGITEFLTAGKRRQQAAIRRSRRLNAILASLLVVALLAAGGAIWQWRTAETRRQEALSRQLAGQSDTLFPTNPTLASLLAVQAYRTSPTAEAAHSLQNAAAIPLRWSMPGHSERVGKVAFSPDGRTLASASTDRTVRLWDARTGKPGPVLKGHTDEVWSVAFSPDGRTLASGGFDGGVRLWDAHTGAPRRTLQGNADAVVSVAFSPDGRTLASGGDNESVLLWDLGTGKTRAALGGHTSAVRSVVFSPDGRFVATGSLDQNARVWDAVTGELRTGPLKHPGEVHAVVFSPDNRTLATSTNADSGVRLWDVSSGKESRKPLVGYGGLSESLAFSPDGRTLASGDQDGAAVLRDVAGDTLLAVLTGHTNAVWSVAFSPDGRTLATGSDATVRTWDVAAGANQATLTGHTEAIWSMAFSPKDRSLATGSIDGTVRLWDVAKRTSQTPLKAAGPVREVAFSKDGQILATGSMDGNVELWDVRTHTRRAILPAHEASVEAVAFSPDGRVVATGDGTTVRQWDVGSGKEIREPLAASNSVSAVAYSPDGRTLAVADTDNVVHAYDAASGTPGAALKGHSGSVFALAFSPDGSTLASGSEDTTVRLWAMPGGKSLATLTRHTSPVTSVAFGPEGHTLASGSLDTTAVLWDVPSRKARATFTEFAAVQAVAFSPDGRTLATGNADHNARLWNVTLPPPTEAIRKICQAVNRNLTAEERAGHLPDQETAPLCARG

SEQ ID NO: 4954 - protein, 109 aa, synthetic construct
  REGION 1..109: note = TnsF-Tn7 System Protein
MIKKMGYQWLLRRLMAEQEMYQTSDLVPLLAERGITLSREQVYRLVTQPPQRLSMDTLVALCDILSCTPNDLIKPEGVNAQLRKTADETAGPVPLARRTVVRRPGQSPS

SEQ ID NO: 4955 - protein, 415 aa, synthetic construct
  REGION 1..415: note = TnsF-Tn7 System Protein
MTCDQPGLQHYAGTCLRCSVRRRAATLLADEHGYICSQILPFIVYLAAEERRPDSTLRWLDHPKTIALLQHIARVEHPIVHADLDALPPSTALHYLRAVLVHADVLPPRIEPLGRLEQWLHHLTGTLTAEHAALIRPYAQWSVLRRARRRAVRRSYTDSSAQSDRAIIWGAVHLLEWLDENDLAITDLNQHQLDRWTSINGHRTYSITGFVLWLRQRDIIGDAAVSRRQSAFPTDVAEAHEHARRIRRLLTDATIELPLRVAGLLVLLYGIPLTRILALSISAVEQQDGETSIVFARNPVRLPPTVATLVNELVETAIAHPLATKTGSPFLFPSRTVPGTARHARPVGVAMTALDIPVRISRNSALRILTEDLPAPVVADLLGLHIHSVSRWADYARRDWAHYLGARSNPRIKGN

SEQ ID NO: 4956 - protein, 415 aa, synthetic construct; identical to SEQ ID NO: 4955
  REGION 1..415: note = TnsF-Tn7 System Protein

SEQ ID NO: 4957 - protein, 1068 aa, synthetic construct
  REGION 1..1068: note = TnsF-Tn7 System Protein
MQVSERMDVAVGYFNLRGWSVFDSLVKEKAEQGRPVPVVRILIGMVMTGPQEEALEELQAAVEGTEVLDADFNVGRERKAQLLEQLRTQLMRGLPTTADRAALQSLRDLLESKAVEIRVFTRRPLHGKAYIFHREDLNNPITGFVGSSNLTAPGLTHNYELNVDVLETNAAEALAEWFEDRWTDKFSREVTADLLTMLDESWARKEPRRPYEVFLKVCYDLSRDVREGLAEYSVPSEVSSQLLEYQSTAVRTLARRIMTKQGTMLGDVVGLGKTLTAIAVALMLRDEHGYMPLVVCPKNLAKMWEEHFEAYNLYGRVVPYSMAHTILPDLRRYAFVIVDESHTLRNDERRDYKAIQEYIHANDSKTLLLTATPYNIRFRDVANQLSLYIDDDDDLGISPTNAMAADPRLIDKVDGKITTMAAFRKSEDPDDWKRLMSEHLVRRTRTFIKNNYSETNEDGRQYLEFSNGTRFTFPERIPKPVDHSFGPDDPAAIMSSDTTLDTLTNLVLPRYELGKYLKKTAKLTDEEKEFVDNLNRGRGNVAGFVRTTFYKRLSSCGHSFTLSLQRHIARNELFGYAIDNGLRIPTGTIVDTSLTDDDDPTASDIDTAERLTDDPGRRYEALVSSNSAAVTWIRPELFTTELRKDLDCDTTALHGMLQSYGGWEVATDSKLAALTKLLTADHPADKVLVFTEYKDTANYIAEALREAGISGVGLATGDSDDPTALAHLFSPRSNALPGHDSFGVDNELRVLIATDVLSEGQNLQDAHIVVNYDLPWAIIRLIQRAGRVDRVGQQSDEVLLYSFFHESVDNVISLRQRISDRLSANAEAFGSDEQFFGSEGEVQAITDLYNGTLDDQDSAEDVDASSLAYQLWHQAQEKDPDLAARIAALPDMIDATRAKRLSDKDEGVICYVRTESGMDGFGIATSDGETRLLTGHEVLRAFEATPEELGLEHREDHDELIEKLVRGPLATPTVAAGRLRGVRRTLWRKLGESLNAHDNETEKALDELFQHPLQRDAENRLKRSVRNGASDDDLTTMIRTLHRDQRLVIATRTGKDPIRVVSSMGVTA

SEQ ID NO: 4958 - protein, 345 aa, synthetic construct
  REGION 1..345: note = TnsF-Tn7 System Protein
MSEAMIEGWTRQQRSRFLKDQTIAARIRMIRRFSEFTNLYPWQWTPAEAEAWISDLRSGDRALALSTIRSYEITVRLFCEYLTDNRYGWMQVCADRFGSTPQLVFHEGNSVLHIGDYEGSPRRRPLTYDEIQALFDAADGRAEKIRADGRKGALAAMRDSAMLKFCYAFGLRRSEVCNIDLVDLRRNPQAPQYGSSGSVAVRFGKASRGGPAKRRTVLTVPEFDWIVDVVEHYLTEIRPAFAPGAHPALWVTERAGRISPRSVNAALTAARDDANLDPILDLHCLRHSYVTHLIEFDYPVRFVQEQVGHAHASTTSIYTGVSNEYRNQLLTRAMRNRHGELWSES

SEQ ID NO: 4959 - protein, 105 aa, synthetic construct
  REGION 1..105: note = TnsF-Tn7 System Protein
MNKKMGYAWHLRHKMAENDIFHTSGLVPLLAERGIALSREQVYRLVTSPPQRLSMDTLVALCDILECTPNDLIEPKIVNETIRKAASDRSAPAPLRRTTIRRPQH

SEQ ID NO: 4960 - protein, 408 aa, synthetic construct
  REGION 1..408: note = TnsF-Tn7 System Protein
MERLLPGNDGHGNPICVDCAGIPVSFRCASCGVEDEFWYARTCLRCSLHRRLVELLDDGTGRVAPLLLPVLSALCAADPSRGLSWLRSAPVRDRLRALASGQVAITHAGLDVLGRSSGVEYLRDLLMAHGVLPRRDKHLAQFERWAALRLETVAHAEDRAAITAYVRWHQLRRLRADASTGELGKSKADLARQQTNIAIKFLAWLRRRGLVLAACRQADLDAWLASPVTTRLHTRSFLVWAMDNGRCPRLVLPRHRGGVPRTMSQARRTELVAQLFVDESIELADRVAGCIILLYAQPIARVAQIKVAHLKERDQEVWLRLAGEAVPLPEPLGSLAIKLKGRRPNMATAANPKSPWLFPGRSAGHPLEARQLARRLGRVGVSRLGRLAAFHQLVTAIPAPVLAELLGY

SEQ ID NO: 4961 - protein, 408 aa, synthetic construct; identical to SEQ ID NO: 4960
  REGION 1..408: note = TnsF-Tn7 System Protein

SEQ ID NO: 4962 - protein, 373 aa, synthetic construct
  REGION 1..373: note = TnsF-Tn7 System Protein
MERKFNVAGAAHMVVLDGVALLQPDAQVFECMLDGWRQQQLSRNLGFATVETRAQTVRRFQAHTNAYPWQWSPAHLEEWTTDLRANKRRARSTIRSYQLAVRAFLAYLCDPVYGWADECERRFGTHPVQICHEWNTAAHLSDYEGRPARRSLTRREVQALFDCADAQVAEIRARGRKGWVAAFRDATMLKVTYAWGLRRREAVMLEAHDFGINPKAPEFGSFGVLYVRHGKASAGGSPKRRSVLTVMPWSTEVAAEWVENIWPQCRREGEAGLWPSERRPRVSEDRLNAAFGRFGAEAGLSDGLGVHSLRHSYVTHLIEDGFDALFVQQQVGHQHASTTSIYTSVSSDYKTRVLRAALDRVVADARAQERSPS

SEQ ID NO: 4963 - protein, 109 aa, synthetic construct
  REGION 1..109: note = TnsF-Tn7 System Protein
MRRSVSYTWQLRELMASHGMWKTTDLAPLLAERGIELSPAQVYRLVSQVPERLSLHILAALCDIFSCTPNDLVQTSAHAAPKRKAAGSSGVVDLNTVGRPRRARVHRAP

SEQ ID NO: 4964 - protein, 400 aa, synthetic construct
  REGION 1..400: note = TnsF-Tn7 System Protein
MATFLLAGDDGTVPPWLNPLLTMITNSPRPDSTMRWLQRSTSTDLLHEIARLPRPVTHADLDARPATLALDHLRAVLVHCGVLPPRQEPLGRLEAWLEHQLEGLPPGHAAVIAPYARWSVLRRARRRAARRHYSFSAGHGDRRRISEAIRLLRWLDRRGRSLADLTQADLDRHLRGDRNRAAQLTGFITWARHRDLVDARLVVPLRQPDEPIVLADVQESDARIRTLLADSDVSLETQVAGLLVMMLALPLTRIQRLTTNDLHTRDGVVRLALADHPVPLPAVLAERISRLAHIAQNKPYALVPGANDNRWLLPSPSLPGTHLCTRQIAVNLHKAGIPVRASRHLALIRLAERLPAPVLAELLGLSQSTAAKWAVHSQTGWADYLAARTTTTGDRGGCDE

SEQ ID NO: 4965 - protein, 1281 aa, synthetic construct
  REGION 1..1281: note = TnsF-Tn7 System Protein
MTVHVLHAGDGYTYLTRQVASGDVQRDATQSLSDYYMQHGNPPGRWVGAGLTDLGVDGQVREEQMRALFGEGRHPDADRLERAAVARGESVADAMKSTQLGRRFPKFEQAEDDGYDARLSAAFATFRATNDRAPEAGVERDLIRWNVAREILTERTGHPRVDDAAVARFLADRGAGGRQAVAGYDLVFTPVKSVSVLWGLGDDATRRAVEQAHEEAWRSTLTWLEKEAALTRVGAGGAAQVNTRGFVATAFDHLDSRTGDPNLHTHVAVSTKVQGEDGKWRSLDGRVLHALGVAASERYNTALEEGVRDRLGVRFVAESRGRGKQPVREVEGIDPSLRKAFSTRRESIENSYRELVAQYRAQHGHEPSKAVQYNLAQQATLDTRTAKEGGVSLAERRAQWKDRAIVELGSEEAVEDMVRRSLHRRPDVAPAALELTVDTLADEALHALAEARSVWTVGNVQAEAQRVVRARGGDVAGLDLTRLGDDVAAAVLRRSLPLNPPDLNPVPAALRRADGESVYLEHARQRFTSAAVLEAETRVVAAAQERGGLVVDAATLDAAAAALATETGRELNAGQLELARRFAAGGHVVEAGIGPAGAGKTTSMRAFARAVEMTGGRVIGLAPSAAAASVLADELGVGADTLHKLLHEHSTRQDEEIAEALRLDERTVILVDEAGMASTPDLDRLLTLAREHGAAVRLLGDPAQLQAVGAGGVLRLVDAHVGAAHLEHVHRFSNPDEAAASLALREGDARALGFYIDNARTTGGTRDAMLEEIYGAWWNDAAQGKAAVMIAATNADVVALSTRARLDKIAAGEVESDGTSLHDDTLAGVGDTVVTRLNDRRLKTERGTDFVKNGDLWTVVERHGDGALRLRHVQHHGFVTVPGEYVAENVELGYATTIHRAQGMTTDTAHLLVGAGATREQLYTGLTRGRHDNHAYVVTDELLDVDLHEQPGPGGATRAALESVLARAESTPSATSTLEHEYDQAASLSRLVPQYEDAVQRFVLAEHDQHVTDALHTSLDPDLVEQITDDDAWPALRARLAQHHLAGTDVADLVAGAVDERELGTAESVAAVLHHRVGEAPRVDDPRTPELPSWITSLPPAPTRPGPVADVTAWARSQAELVHARVEALVDDVETHRPAWAAALRPAPADPLERITWRRDVARVAAYRDRYEISDTTTPVPDEAARGVQESARLDARAAADRLRDRHDDAEAAPLDESGRDRARTQTSSRIDDLLRRTRQTKTSSDLETLADRLRRQRTQPGPQPDDDRRDPGGPTRGPRL

SEQ ID NO: 4966 - protein, 1281 aa, synthetic construct; identical to SEQ ID NO: 4965
  REGION 1..1281: note = TnsF-Tn7 System Protein

SEQ ID NO: 4967 - protein, 369 aa, synthetic construct
  REGION 1..369: note = TnsF-Tn7 System Protein
MDDLRASAPSVLERNVVALDPAQAVLEAMLEGWGRQQRARFLRDATITARLRMVRRFVQFSGLYPWQWGPAEGEAWISSLRSGLAPRALSTLRNYEISIRMFCAYVRDPRYEWGAECVRRFGAAPREVFHEDNSVLHKDEYEGEPRRRPLTFDEVQALFDAADGSVDEIRRRGRKGSLSALRDSALLKTCYAFGLRRGELFGADLVDLRGNAKAPRFGRVGTFAVRHGKASRGGPSKRRTVLLVPEMDWVVDVLTHYLQEVRGPLGKDASTALWVSERGTRLSRRAINEAFATARDAAGLDAGLDLHCLRHSYVTHLIEFDYPVRFVQEQVGHAHASTTSIYTGVSASYRNQLLARALDTIYGEHLEQA

SEQ ID NO: 4968 - protein, 113 aa, synthetic construct
  REGION 1..113: note = TnsF-Tn7 System Protein
MIKKMGYEWHLRLRMAEHGLYATSELQPLLAERGIVLSREQVYRLVTQAPQRLSLDTLVALCDILRCTPNDLITPKVVNEEIRKDATTGAPVTPLKPQARRTQIRRPRHDSAP

SEQ ID NO: 4969 - protein, 373 aa, synthetic construct
  REGION 1..373: note = TnsF-Tn7 System Protein
MQHSLINSGKPSTVPGWLSSGSTAKLLRTLTESGQPITHEALDQLPHATSVYYLRDLLTNTGVLQPRADEYLARVQPWLTTIVATTPTQHARLLTQFTHWYLLPRARRRARTQPPTLTAAATLRSSVLAALRLLAWLDTVHTELSQFSQSQLDYWLDEGDVHHRYLYPFITWARQQHLINQDIHIPTRRTPGRPIDLDTQHRLDQLRMCLSHNSMPLPARVAGSLILVYGMSLTRITTLRRDDVITDATQTWLRIRSHMLLLPPRLASLVHDLHRTNDPTQRTRARLGTTTPFLFPGGTDARPLLASTLGTCLAKHGIAALDARNATRAALASELPAAVLADLTGIETTTAVCWNRRVGQDWTDYIAARPQQG

SEQ ID NO: 4970 - protein, 373 aa, synthetic construct; identical to SEQ ID NO: 4969
  REGION 1..373: note = TnsF-Tn7 System Protein

SEQ ID NO: 4971 - protein, 551 aa, synthetic construct
  REGION 1..551: note = TnsF-Tn7 System Protein
MIHRRLLQLVGVVAGPVVLMAALSTLVSACHIAGAVLAATVLADLTGGNLTAVPPAIAVLVGVVVVRAVLLWSREVTAARFGIAIRTRLRGELLRRITQLGPGWTQGGRAGAITHTVVDGVEALDAYYSRYLPQLIVTCVVPIGVAGWLFTVSVPAAAVLTVAVLCAVVVPRFWDARLLRTGQTRWSAYEKLAADYLEATHAISVLRVFGAGRRIGEALAERGEHLHRRTMTQLRVSLVEAGASALALHLGTAVTIVVACAGVLGGVTPAGSVLLFLLCARECFRPVLDLSAYWHLGYQGLGAVKGIDEILTAHPAVVDTGTRTEPARAGVRLRLRNVDYRYPNGTGVTDVSFDCAPGSTTGIVGPSGAGKSTLARLIVRHADPQQGTIELDGTPITEYTLAALRASIGVVGQHTYLFHGTVEENLRLARPDATFEEVRTAAFIADALEFIEALPQGFATVLTENAVQLSGGQRQRLAIARAVLAATPVLLFDEATSALDVDTEQRVLTRLAEHCRGITRIVIAHRESALRDADVVVTIESGRVVSSVTPL

SEQ ID NO: 4972 - protein, 551 aa, synthetic construct; identical to SEQ ID NO: 4971
  REGION 1..551: note = TnsF-Tn7 System Protein

SEQ ID NO: 4973 - protein, 268 aa, synthetic construct
  REGION 1..268: note = TnsF-Tn7 System Protein
MRFDHVSVALGGREVLRDVDIEVRPGRFLGLVGPNGSGKSTLLRTLYRAVVPSSGRVLLDELDVWRGNRRAVARTVAVMTQDTSTEFDLTVLEVVLLARVPFQRGFGRDTEADLDLAWTALERVGATDIADRPIGRLSGGQRQRVMLARALAADTPVLVLDEPTNHLDIAFQLELMRIATSLDRTIIAALHDLNLAATHCDDIAVLDSGRLVATGTPAEALTPRVVQDVFQVAVDQLTHPRTGHPVLVFDHPPQSRPEPSTHRGEIHA

SEQ ID NO: 4974 - protein, 268 aa, synthetic construct; identical to SEQ ID NO: 4973
  REGION 1..268: note = TnsF-Tn7 System Protein

SEQ ID NO: 4975 - protein, 107 aa, synthetic construct
  REGION 1..107: note = TnsF-Tn7 System Protein
MTKKMGYEWHLRLRMAERNMFQTTDLVPLLAQRGIRLSREQVFRLVTTPPQRLSMDVFAALCDILDCSTNDLIEIKPADRQGRKAAGDKPATPPPVRRTTIRRPDTP

SEQ ID NO: 4976 - protein, 371 aa, synthetic construct
  REGION 1..371: note = TnsF-Tn7 System Protein
MIRPELQPVRDALTELERPRSLLNNWHNLASLRLLTSIAQSEVDLSHDALDARPQVFSVTYLRALLVAAGALPPRDENAARLHRYATEVVAQVIDPEMRGVLARYARWHVVGRAKADRHGRIAPNAAARCRGDIDIARAFLDHLVSAGHDLDDCPQAHLDAWITTDRSRRLAFVRWLKRGGYLRQVWLPDPVPAKDPAHDVDAEDQLALVRALLHEPDSASVEDRAAACLILLYAQPVAKIVRLTVDDIQTRAGETYLRLGAEPLLLIPPLDKLVTALPVAKPFGAASRLADSRWLFIGKSAGTHLHPASLLRRMHHLGVTSRASRNTALLHLASTTPPAVFASLVGVSIGTATRWAGLAGASWNRYAAWR

SEQ ID NO: 4977 - protein, 371 aa, synthetic construct; identical to SEQ ID NO: 4976
  REGION 1..371: note = TnsF-Tn7 System Protein

SEQ ID NO: 4978 - protein, 331 aa, synthetic construct
  REGION 1..331: note = TnsF-Tn7 System Protein
MLAERTIKTRASQVRRFADFCNAPPWEWSPADVEEWTTSLVSGPRPLSVSTVRAYQNAVALFCDYLIDHRYGWVDRCVDLFDTHPVQVCHEWNTVIHTSDHEARPGVRPLSRDELQMFFDYADDLVDRARSSGRKGWLTLFRDATLFKMIYAFGLRRREAAMLDLPDFTRNPQGWEFGRFGVCNVRWGKVMKGSQPRRRAVLAVFGWTRPVIEEYVTEVRPRFEIADMTILWPTERQGRIQLGHIDDRFADWRDDLGLDPLLHPHCLRHSYVTHLIEDGYDPLFVQQQVGHRWGSTTALYTGVSGDYRNRTLRRALDAAFTPPAEIEGGSR

SEQ ID NO: 4979 - protein, 509 aa, synthetic construct
  REGION 1..509: note = TnsF-Tn7 System Protein
MTGQDQERLHSAVLLSPGRERRQDRRARKAAARSLLAQDRHTRRAAAKTKSEGLAAERRATVVLPKAGEAGPAALRTPGRLRLPRHQDTSATLAGAYPFLAEGGLGSDGVFVGQDLYSGSSFVYDPWVLYTRGLITAPNLVLAGIVGSGKSALAKSLYTRSIPFGRRVYVPGDPKGEHTAVAEAVGGKAIALGPGMANRLNPLDEGQRPRDIDDSGWAAQVATRRRDLLGALAETVLDRSLTPLEHTAIDVALSDAVRSCKVPVLPLVVERLLTPDPGSDLDARLAEDGRLVGHALRRLVAGDLAGLFDGPSTVRFDPALPMLSLDLSRVSQNATLVSVLMTCASAWMESALLDPSGGQRWVVYDEAWRLMSHPALLRRMDAHWRLARHYGIANMLIFHKLSDLDNVGDSGSAMRALASSLLANAETRVVYRQESDQLGSTATALGLTGTEQALLPTLGTGQGLWRIKHRSFVVQHQLHPAELDLFDTTARMSTAPAKHLSTTQTGEPR

SEQ ID NO: 4980 - protein, 509 aa, synthetic construct; identical to SEQ ID NO: 4979
  REGION 1..509: note = TnsF-Tn7 System Protein

SEQ ID NO: 4981 - protein, 114 aa, synthetic construct
  REGION 1..114: note = TnsF-Tn7 System Protein
MTKTVAYHWHLRKVMNEHGMQSTTDLVPLLADRGVVMTSTQVYRIVVGQPERLNMQFLSALCDIFGCTPGDLIEPYVESASRRGRKTGTAGSVKPPASGSKNRPTRAVISPADE

SEQ ID NO: 4982 - protein, 414 aa, synthetic construct
  REGION 1..414: note = TnsF-Tn7 System Protein
MTCTRCKRESERFRAGLCIRCTLTDDLTTVLKPDDDFRLRRLIGLLTETGRPESIYTYMRRGTKARALLEAIGDRTLPLTHEAFDALPPSTAAEHLRALLVHHRMMPGRGNEKLTRFEHWLAARISNLPDDGTSQLIERYAAWHHLKRIRHKAADPGVNLETVTHAAKQDITEAGKLLIWLRHSHGIAAGELKQTHIDEYLSTGPSTRKHIRNFVRWLNHDRTQPGHLDAPFRPAQSTPMITQSERIELVRNCLEQDHIIRSTRLAGLILLLWAHPLNKIVMLRREHIGITPEGVFLKLGTTPATIPAAITEMFWSQREGSENQNTTNTNTPWLFPGTRAGQHLHPATLSERLKVLGIDAQRARNATLRDLTQEVDARTLIDLLDYSPAVIAQHAARAATRMSDYIVFKHKRSP

SEQ ID NO: 4983 - protein, 391 aa, synthetic construct
  REGION 1..391: note = TnsF-Tn7 System Protein
MIAGLAICVRRSQRVAARQGLTMAQDDENVLFVPFGGEAPDPESFLTLVLDGWERQQRAKDFSPSTIRTRRNVVLSLVDFSGRYPWQWTLGDADDFFSHARAVRNLSHGTVRSYQGAVKLFCDYACSPHYDWCEQSARLFGQVFAQVVTELNRVTHAQPTEARPAKRPFSQRELQDLFDLADLEVVRILDSGRKGALSAWRDAIAFKTAYGWGLRSDELRHLQMADFSRNGKAPFLGDHGVLRVRWGKPHRGSAKKVRSVLTVWEWSAEMVADWIRNGLPRYGHPVTDLFPTSAGKVVGESHLIGRLHDLVDELGFPPGLDLHSFRRSYATHLVTGEGFDVAFVQLQLGHEHAATTSIYTLPSPDYQRLALERVHERIINAALELPAERKH

SEQ ID NO: 4984 - protein, 113 aa, synthetic construct
  REGION 1..113: note = TnsF-Tn7 System Protein
MSRREIDYTWRVREIMARRGVHTATELAALLHDRGITLTANAIWRIVTQEPERISFKVLVALCDALDVTPNDLITYTATDTKTVRQHRKAAGEDIPDMRNYRPVRARIVEDHD

SEQ ID NO: 4985 - protein, 329 aa, synthetic construct
  REGION 1..329: note = TnsF-Tn7 System Protein
MHGAQNLLATQEVRDVYANFTQWGNESGRASKLAAGASRYLQFLAKMDVALEQRAVPLDGALIVQIFSTEELRRMGLLSQYLAEAGLLNDDAATRRRHSEERLLSTKRDAITGQPWAEDIDRFERALLAREPIVSLRSRRGYVHAAVALLTQAKVARATQVGQKALDSFVAKKPGLKASLSTFVSHLNGLHGLRLKLKPKSATPVSLVRQAQYVRTICDAIESSPNRPARLALTAKLLSKLLNAPLDRILQLRHSDLDLKDFRNLRLDGEWLELPEVLLPILASLPSPQWRAGLDADPLLFAGRMLMDSLSASAVDHHVKPVLRARLGA

SEQ ID NO: 4986 - protein, 307 aa, synthetic construct
  REGION 1..307: note = TnsF-Tn7 System Protein
MTAQPFDGELLGSFLVRCAWQQGDAPSSMAQRIGLGWSIWSSDLDRSIGSAAIGQIAKWADLDTTQVEAMTVLPMLAAAGLTTQRSGFQRWLNPVGIYHRKRLRYGQLYCPVCLSADARQLPLEWRLASTWICSVHLIALRDSCPHCDAPFAPYRRDALMTACCDRCTIPLYRGRIERPSREEQVLQMRVRSVWHRASNGEPEMLDGFHAALSNAAQRDPTFAPSVEPWSYWRLAQRRPLLVTVGASTLVRATAGPAVQAIRRVVKEGRRRCAKLPRNRVLRAEMLIRLAAKVKFPRRAKARLAKTA

SEQ ID NO: 4987 - protein, 748 aa, synthetic construct
  REGION 1..748: note = TnsF-Tn7 System Protein
MKWLDRLIRKTTPPEDVPKVEDTASADPDTEAKDPYSSDEPITSKTQDRFGRAPFAARIAQTIAHRADPSSIVIGLFGPWGDGKTSVLKMMEEALDQHEHVITIRFNPWHFPSEDALLRGFFSTLSQALGEEPALKEKVAALLETYGGVLSLISVSLPGVDLNPGEAAKNMGESLSRVSLDQLKEKIDALLGHSGKRLVILIDDIDRLDRDETHAIFKLVKLSASFRRTCYVLAFDDSVVAAALGERYGAGGDEAGRAFLEKIIQVPLHLPPVDRISLRQLAFEGVEQALGQAGITLEKQQVDIFMRHFVDGLEPKLETPRVAKLYANSLMFALPLVKGEVNIAEFMLVEGLRVLYPKLYAAIRDNPDLFLKGEGERRVRNLEPPPSRINDLLVDAMPGSTSNEREVVRERLIKGLFPRTGNMNYGGEWDEIWASTQRICSGRYFRRYFVYGVPEGDISDTEVATLIVALSTGAVADQDARLARYPKRAIPQLIQVLRERADQLDVQAALPLALAVARNGGQLPRERGAFVLGGTRMQAGFLLAQLMRRIPQADRQAAVESVVQSAQPLSFAMECSRWLTHSHDRTEEYVVLPEAGDPPIYALLADRVRTANNGSPIFQQFGTDAPGLYWLWLKADGKEGVEPHLRQAFDARPEALDEFLDTYVGEGWEMESGLPVRSDLRRESYDQIASLITPEYLIANLRARYGAEMDNPQYRADGPMARKIAHQFAYIHKAANQAGEPEDADAES

SEQ ID NO: 4988 - protein, 748 aa, synthetic construct; identical to SEQ ID NO: 4987
  REGION 1..748: note = TnsF-Tn7 System Protein

SEQ ID NO: 4989 - protein, 237 aa, synthetic construct
  REGION 1..237: note = TnsF-Tn7 System Protein
MKITIIDLTESDEGVRRIPKNYRAVTGRVETLEGDTVEYESTLERDLVHLLDFNARVAKVVSQPLKIRYRVDGGEIRSYTPDFLARYRAVGDSKPWRPALFEVKYREELLDRREDLAPGFAAARMVCRSKGWKFRVLTERFIRNTYLENVQFLRNYRSYPDDGAKSLMLLRTMEQLKIATPSELLAATFMDLTNRMEAVGVMWRLITSRAIGANLTARLNMSSEIWHEEPVAYGLER

SEQ ID NO: 4990 - protein, 648 aa, synthetic construct
  REGION 1..648: note = TnsF-Tn7 System Protein
MASSADFRGFAVRPGVHVGFKGRLHTVRRVLTSERILVEDPTNGRSEVAFLDQIVHASQIVDECGPAESDATPRRRLEILGYSEAEIAKAESRLDVILPLLTMRGRKRKDVEAVAKVAGKSVVTIYAWIKSFEGGGLAALTDETRGPKSGSKLDPRVEEIIQDTIDTLYLDSQQLVPAEIITTVGERCEAENKPVPHENTIRNRIAAVPRDVVSRRRGHPEDADLNLPTPGTFPTPVGPLNPVQMDHVRLDMMAVYSDTRLPWGRPWLTLLICVKTRMIVGFYLSMRAPSSVAAGMAIAMGMLPKKGYLGSLGISGNWPVQGKILKLHCDNAKEFRGETLRFGCKEHGIDLELRPVKQPRYGAHIERMVGNVNAMLRKKPGTTFANPAQRGTYDPRKKSVYTLWELEVEVADWIVNYYHVDKHRMLKMPPKNAWENEIMGTATVRGAGLPVQISDPEKLKLDFLPFEMRVVSPSGVRFGKADYYHESLNRWVNAPDLDHPTVKRKFVIKYHPNYPRNVWFLDPDIKQYVKLDRWPLQAAEDDEQDRISVDELMAIDSRDHAHGKQMEDKVAKRGYRDRSAKRQEEAVAATKRARSKRKQTTPTAPGKQDRSRIEQQMDPQSAEVDTTSNPFAAFAGKKVRAFNVSEEQ

SEQ ID NO: 4991 - protein, 273 aa, synthetic construct
  REGION 1..273: note = TnsF-Tn7 System Protein
MRRTPSSDSVKSMIVIFISVRSIIVASMINRSVIELLCIGNCSDPVQQIIRIHSGSPPRPGEISLAHHGVLFLDELPEFPRAALEALREPLEAGHITIARAARRSEFPARFQFIAAMNPCPCGWLGAAHRNCRCTPDQVARYQDKLSGPLLDRIDLHVEVPALAQGELLAAAAGEASESIRQRCTAAREVAIRRQGKPNQALQGKEIDGHAGLEATAVKFLNTASARLGWSARSTHRVMKVARTIADLAGAAVTQATHVAEAVQYRRALSDRK

SEQ ID NO: 4992 - protein, 654 aa, synthetic construct
  REGION 1..654: note = TnsF-Tn7 System Protein
MMQNAFIRNRAEEFDHDVWSTYVLPLYFPQLGLHEARKSQVLQGGRGCGKTALLRYLSYPSQFSPSRMAVPSSALQTIGLYLKADSTYFSGFTGYGESEERWRDIFEHALTLALAEQIVGSVRALNCTSERLGHFGKLTQLDFKDAVQGFAGDEVPADLVGFEKWLRLQRQFLSRWFKNFDSTQPPTLLPLKGFLSALIGELRGKLPYLSNSVFAVYVDEYENLLDYQQRFVNTMIKGGEPPLIFHVAMKPNGMRTRQTIGTESIQETADYRLIRLDEELKPSFSQFCAELFFFRLISEAGLLEELTPVVAQELREQEGLVRRRSPEYQGRVLDEINRILPGQRYSEVASQVLSDTALRGRWESIVAQALKDEGSKLTPDDFRDVQFPEESVVNAALLHQRSKRSKEVQEEFAKLRAGKTSKYKTADWTHHILVGTLLLMYLPLRQKPCPIYAGFDAFVQLSGISVRHFLELCHLSIGDSAPKNSLANFSVPVKEQAEAAVRASRKFRGEVSSFGDQGNRLLALVNLLGKLFRLSQGRYSQSEAERTHFSIVGEELTIAADQVLKEALKWSVLLDVPETKVKGNRYESNDYILNPIYAPFFGLSYNKGRKLEMPSAEAETMLVGKLDDFTKLLRQYEVKWGADSGDQFSLGLEG

SEQ ID NO: 4993 - protein, 654 aa, synthetic construct; identical to SEQ ID NO: 4992
  REGION 1..654: note = TnsF-Tn7 System Protein

SEQ ID NO: 4994 - protein, 300 aa, synthetic construct
  REGION 1..300: note = TnsF-Tn7 System Protein
MISRDHLSKQAAKLLEAPLSDKLAFIAQDPPHIDYPASDYILRELQDLVDRPRSIKPECRAVISDSDNGKTTLTRHFMRKNPIVLDEADYPIAKVLWVEAPPTADEGRLYSAILTAMGVSHRADARPERLEAIVHQEMAISQTSVLVIDELHAILNSPAKQHKLFMASLKRLSNMRQLSIVACGTSDVTRALAIDPQFVNRFLRLPLPLWSANEDFVSLVAAFEQLIPLPKPSNLTSPGMVFEIYKGCNGTIGSVRKLIMRAAQVALRTGNDRITFDILTNARKWRQAASLTASPQPSDA

SEQ ID NO: 4995 - protein, 300 aa, synthetic construct; identical to SEQ ID NO: 4994
  REGION 1..300: note = TnsF-Tn7 System Protein

SEQ ID NO: 4996 - protein, 504 aa, synthetic construct
  REGION 1..504: note = TnsF-Tn7 System Protein
MRSPVARPRKPEDRDKYPTACARCKGHYSLVKRWPDGTVCEYCYVAAKRVTGVCACGHKGILPGIIGGRPACRGCSGVDLNLDCVECGAEAELYSAGRCQRCVLIATAQRLLTNPETGVLSPELERIVVALGSMTRPNSGLTWIRQKHVDEALQHIAAHPELTHQVFDLLPKGRTTNYLRALLVEHDVLPARNERVIAFREWMDSALERVHTDEHRKLVSQYARWSLERHLRSKDAVSESSFMGAKQVATVTIEFCNWLTTEYDITIGEADQSHLDLWLSTGSVTRLRLERFVCWVVKSRLVDQTLEVPRHRRGTAPRLPAEEQDAVIDTVVHQSTLTPRDRLAAILVIVFGQRVETIAALTWDQIAIDDIVTIKIAELPIELPPPLDQPVRQLAADPSNSQTAAHRDSPWVFRGQKPGHHMGPTALRERLRPTLAAFDARLGTLNQLTQTTPIPILAETLGYSPATLEAHAQASGATYARYVAARTDSHAQSEDRDPAQGELW

SEQ ID NO: 4997 - protein, 413 aa, synthetic construct
  REGION 1..413: note = TnsF-Tn7 System Protein
MRAGQCARCVLRGDLDELLRGGGGDQGFIAQLIDILCGVDRPESIITWKRSEKVQQLFAGLRCGEITCSHESFDALEPGRHVSHLRSILVHHGLLPRRDERLKVFEGWIEMKLAAIRSKAVRGPVEQFARWHHLSRIRTNSTAEGNSDAPVRSAKQEITETIKFLTWLHKTHKRTASSCRQPDVDEYLASGPTTRHLIRTFFIWARKSGINRTVVIGHRVAKTTSTLTQEQRLHWLHELLTGASESLPYRVAGTLLLLYGQLPTRIAALPMESIVLTPDELRINLGTEPAPVPEPFASLIREHLANRPNLRTAAGTAETPWLFPSNRAGSHIDPQTIMHRLRDLGINLHGARNSALQHLVKEAPPPIVAELLGYSYQVAHLHAQKAAQTWSQYAAGSLGGKQAKPANLSPQRQ

SEQ ID NO: 4998 - protein, 504 aa, synthetic construct; identical to SEQ ID NO: 4996
  REGION 1..504: note = TnsF-Tn7 System Protein

SEQ ID NO: 4999 - protein, 949 aa, synthetic construct
  REGION 1..949: note = TnsF-Tn7 System Protein
MENDFSYEQLSPRSFEQLSVAVAESVIGAGIEVYGPGPDGGREATWSGTINWSNTDTDDKDRWQGYTVIQVKHCSNPTQIPDRDLAWLTNEIAKELKSWMNPETKRTQFPAYLLIITNIKLTPADPGGTMQRLNIYIDSQLDHKYGIGKQAKTLRDRGLREIKVWHRNKLNSLLTNNSSIRQRFTPLISVGDIIERLQHLPGSIPVNKLAQVFVDHAQSALQTSRWIRFDDAGDDDSRHQIDRIVVNLPVDKQDGTRSTALSECVERSERLLRLSLCHAERSGAEPPPRHLVITGAPGNGKSTLTRYLAHAYRADFVSNEKNPTSSSSSIINETMTSFDRLGLIRPTIHRWPLRIELAHMAEAMGPTPDSGPSIQKYLCDLISQRSAVQIHPDTLNTWLATWPCVLLFDGLDEVTHRSLRERVINEITQLVASSDDSDCDLFIIVTTRPTGYTERLLPKHFDQLDLAYFTHDEANVYGQFVTSQRLAADEPEYRQSILNKFTKAVNSPGVQRLLKTPLQVLILTVIVASTGQLPTNRYRLFWTYFDTVFKREANKNTTQQTFLNTYRTEIEDIHLRVGLALHQRCETTQEIRARLPLAELRDIAYERIREDGHQIPQANELADKLVDVATRRLVLLVADEDQTVSFDVRSLQELMAGRALIARSEADHRHNLTIAARSPHWRNAWLFAAGEMFAGGSYDREIVVKVVEDCDAHGPWPGWLYPVGPELAAEILDDGLAANKPVFLQRLLTVALRCLDGPMPTEPKSLARGLTSAATDSQLRSTLRDALAQGLAGTPVQRAIASALIHYGDFGGYIPGEPQNPQRYADMWVYRGPKSQGSPIRLGSLIRNELERYAGKDAISEQLSAALTDCDTLRLQYNELGEMKPLSSSGSKEFDSPSTYAALSDTDDSELLQIALSELSPDDWPAKSLLARACWPALSRVPISGDLRI

SEQ ID NO: 5000 - protein, 949 aa, synthetic construct; identical to SEQ ID NO: 4999
  REGION 1..949: note = TnsF-Tn7 System Protein

SEQ ID NO: 5001 - protein, 335 aa, synthetic construct
  REGION 1..335: note = TnsF-Tn7 System Protein
MLEGWRNQQLSRNLAFSTIEQRLALVRRFQASVNEFPWQWSAAHVDEFFGDQRAVRGSTHSTLRCYQNALRMFCSYICHPEYGWDGLCERLFNAFPAQVCFEWNTARHVQDSEHRPKKRAFTRRELQDFFDRADDEVTRVAESDRKGWHAALRDSVMFKTTYAWGLRMNETSHLQSVDFSRNPHAREFGRFGVAHVRFGKAMRGSPPKARSVLTVFDWSGDILEEWLDRGYDSDGLDLFTTERGTLVSEPTLLRRFRRYCQDLSLSEGLDLHSLRRSYATHLIEAGMDPLFVQHQLGHEYASTTALYTCVSSDFRTRTLRRALDSALHEALNCGV

SEQ ID NO: 5002 - protein, 344 aa, synthetic construct
  REGION 1..344: note = TnsF-Tn7 System Protein
MLDGWRAQMLARGLATDTIKARCRLVNQFGEFTNEYPWKWKPVDVDEFLAERRSGHRPIALTTLRTYSNSIAMFCSYVSDTRYGWVDFCEKQFGDFPAQICFEWNTPRHSTDDAVPPARRAFTKAELQHFFDVVDDFVDQQFSAGSKRWLPALRDSTAFKVGYAYGLRRRELTMLDLTDFGPNPHVLDYGNYGALTVRWAKGTNGSGPRRRTVLTTPEFDWVVGLLDFWCTDRGRGLFATSDRSAALWPSERSDRVTLSTLTRSFAHFREMAELPAELSLHALRHSFTTHLLEAGYDPLFVQKQLGHQYASTMSLYTSVTADFKQKVVQQMIARRLRTGLHGND

SEQ ID NO: 5003 - protein, 91 aa, synthetic construct; identical to SEQ ID NO: 4012
  REGION 1..91: note = TnsF-Tn7 System Protein

SEQ ID NO: 5004 - protein, 120 aa, synthetic construct; identical to SEQ ID NO: 4013
  REGION 1..120: note = TnsF-Tn7 System Protein

SEQ ID NO: 5005 - protein, 346 aa, synthetic construct
  REGION 1..346: note = TnsF-Tn7 System Protein
MSHTVLDQCPPGWGRHHLRELLIDAAILPERDEALERLDTWINDTAAALPTHHSALIRPYGHWAILRRARRRSRRRRFTHAAADSGRTKIRIAITLLTHLDQHGHTVGDLTQPMLDAWTDGQHHRTNNIAGFITWLTQRGLAANISVTRYPVPPPSQTGDEHTQQRAIAALLSDDTSADLPTRIAGLLVLLYGARLPQVQNLTTSSLTRDRGRRYVTLAHHPIELPERLAELIDTLAGTVCADPRARARDGRGYYLFRGGIAHHPLHVRTLSRKLTTAGIPTRISRNHALLALGADLPAAVLATQLGLSSTTSSQWAQLAQRDYTAYLHSHDSHDTEHLTRRPRSR

SEQ ID NO: 5006 - protein, 346 aa, synthetic construct; identical to SEQ ID NO: 5005
  REGION 1..346: note = TnsF-Tn7 System Protein

SEQ ID NO: 5007 - protein, 348 aa, synthetic construct
  REGION 1..348: note = TnsF-Tn7 System Protein
MFDAMVDGWAQQQRAKFLRESTIGPRMRLVRRFAEFAGLYPWQWTPEEGEAWISHLRSGPTPLRLSTVRGYEVDIGLFCAYLVDVRYDWSTECIARFGRAPVQVFHENNSIIHVGEYEGDPGRRPLTYDEVQALFDAADARVAQIRSRGRKGAIPALRDAVALKYCYAYGLRRQEVSRSDVVDLRRNSKFPAFGRFGALTVRHGKASRGGPPKRRTVLTVPEISWIVDILDHYLTEVRSELDHTGHPALFLTERGTRLGVRALNTAFATARDAAGIDPTLDLHSLRHSYVTHLVEFDYPERFIQEQVGHAFSSTTAVYIGVSNEYRNGLLMQSIHARYGHLLNDGTPT

SEQ ID NO: 5008 - protein, 108 aa, synthetic construct
  REGION 1..108: note = TnsF-Tn7 System Protein
MKQIDYTWHLRARMAAHGMYSTTDLQPHLADRGITLSREQVYRLVTGQPQRLSMHTLVALCDILECTPNDLIEPHIVDTAVRKTAGKPTGVTPITARRTTIRRPGTES

SEQ ID NO: 5009 - protein, 265 aa, synthetic construct
  REGION 1..265: note = TnsF-Tn7 System Protein
MKTPSDGDTADLLAPVPAVRGALVGVRPRLDPRTVARMPRLTPPPAVITHDPEPLHQHRRLAMLRRVLNDDSLPMRARVAAALVLLYAQPVSRIVRLTIDDVTDDETTVTIQLGDPPSPLPEPVADLMRAYIQSRQHLPYASSRSSQWLFPGRQPGQPMTPVSLQVHLREIGVPPQRGRTSAIRQLVLQAPPPSSRRHSAITTRPPPAWSPRPAEPGADTPPATTEECVVPDGATCLCRHRERYKGRLGSRVELADPRGTESTTG

SEQ ID NO: 5010 - protein, 488 aa, synthetic construct
  REGION 1..488: note = TnsF-Tn7 System Protein
MTEAIPFVRRLRNECLCIGKKVHRVYKGRPFCSTCYARLFKRRLCPACGNHARLPIPTFDKNAICRRCESAAPCVRCAKVGRPVGLMTKQGPACSSCAHYYSAPAPCGKCGELSTRLTRVLNVDPDLRCCPKCAREGAATCPNCRRHRLLIEGPDGRSRCKHCTEVGESLCQTCEKPMPAGRVTECEYCSWERSFSQRSAILVESFEYAPTRQQFVDFCHWLKSEMGPHKATLKLENYLIFFSFLETHQAGVPSYVSLLNHFDADGLRRMQTPMMWLKVRYGVEPDALMREEHSEKRRIDRMIEAVPAGVAAEALLGYRAFLQTKQAEGRTTTRSVRISLRAATDVLASTSSTFNILPTQKSVTAYLTHTPGQAAAAQGFISYLNRTRGSGLLAEVDGLAKARARTNKLESELLELYQSAGEGEAFERTWIKTALMLLHGVASVNKKTVIYRPQSFRGQSGFSVTLKRQDYWVPSPEHKPTPAKIEAE

SEQ ID NO: 5011 - protein, 536 aa, synthetic construct
  REGION 1..536: note = TnsF-Tn7 System Protein
MKPKAIVLSGRVCSGKTTLAKLLVTKADAELIKTKELIKQALPGTGSSRRARHNAGIRLDRESHGAWLANMLSARLVNDKDLSLVVIDAVRSAEQIKCLRNSGWLVTHVHLQASEPVLTRRYEHCNGAAESTSYGEVSGFSTERHSSALAKIADVVIDSDRCNQHDVYARVIARLENRPIIALPVVDVLVGGQYGSEGKGNIAHYLAPEYDVLVRVGGPNAGHKVFRIDDKPYTFRQLPSGALGNKDATLVIGAGAVISLDVLLREINELALTFEKVIIDPQAMIIDPEDIAWEDAVLKGAIGSTAQGIGRATARKILERVPDTGVRLAKNIPGLKHYIRDSVEFFATCLSGGKRIMLEGTQGTSLSLHHGFYPHVTSRATTAAACLAEAGLSPRHVRRVMMVCRTYPIRVGDSVTGNSSGFMSQPIDFSEIAERSGIPASEFAQTEVGSVSHRPRRVAEFDWAQLRRSLLLNGPTDIALTFADYIDIKNRNAFRYEQLSDKTLRFIEEIEKVSGIPVSMISTAFNERNIIDRRMW

SEQ ID NO: 5012 - protein, 536 aa, synthetic construct; identical to SEQ ID NO: 5011
  REGION 1..536: note = TnsF-Tn7 System Protein

SEQ ID NO: 5013 - protein, 600 aa, synthetic construct
  REGION 1..600: note = TnsF-Tn7 System Protein
MSQRLRRFMPRDNLCTTNDGDAILHVHGTVVVWWYERIQRNPNALTIPMVVVIFRFLDKDDRPAGVTPVSIGVSRMGSFRIGTIWKDGKCIAETDFGDTQEFSVDFTDGAWSYLSVTGKHNFPYFKQDHELRSLNTDSVVCDLLNFPLPNEKNLLIPCIDFLYRCYGTTSDMARILVTYEWSDVLEKLYASFEEEDSETWTVSPHPDVEDSDALLLATLRYNAKAELSAKSLYAQIDNALGRGIHETSLKVAPWFEGPAKVRARGRWINNGQTFLSLEVTGMSEPLHHSYNIRRDKRLNNDPERAEPAAPLTRIIVDIPKPQDPFPVTDKMEPGRNAGSWGKPDPTFAKLGPACPFTRTSVERSYLKKETVIIRVEPPSLFSTGDPQGAPNGVSHIVHHAKRVAGDGGILGELWAELQYLKDVYPSFTSLAWYSEAQGFIQGPEFRLYTLESFDEEVDVEDGARRWLRYIDNATRLRGLLLIQAVIDGKTIYLFELQRKKKRQGKVFKDEQISGLAINVDDPEKAREVISKVCDQIRNAMGNFARLENLGVSPNIFRHYSHNGGFAAGLTLRKALEPFGIHLPFLKRDKSLHAAKPVLDD

SEQ ID NO: 5014 - protein, 488 aa, synthetic construct; identical to SEQ ID NO: 5010
  REGION 1..488: note = TnsF-Tn7 System Protein

SEQ ID NO: 5015 - protein, 196 aa, synthetic construct
  REGION 1..196: note = TnsF-Tn7 System Protein
MFAFRGEGVAFESGLERDFLIRMDFRRDVMSAVAQPIQLNFVARNGRSYTYTPDFLVRFHSHTRQSPMLVEVKPEENWRKSWRDSLPKWKAALRYAKQQEWSFHIYDESRIRGQSLRNIQYLERFKRADYEEVDLDAIIRTVSFMGITTVQYLVALHFNGAEALGKSHIFHLIAIRRLDCDISALLGDSLEVMVPQ

SEQ ID NO: 5016 - protein, 637 aa, synthetic construct
  REGION 1..637: note = TnsF-Tn7 System Protein
MSQQPIDVPRGTKLDRSTVNVLPGGLVCHQKETFRITQVLDFESVLGINVESGRASVMPIAELKPFLGSKIRGAYADYDLEELGAEEWAVAQQRYSVISPLLGIEGQSRSVVEQRAKAAGVDPVTIYRWLRRYKEQGEVIALVPIKRGWSKGRPRISDAVEAVIGEALKDFYLTDQKPNVKATNEVIRKRCKALRLQPPNITTVQARINKIPIHIRLRKRGDKELAGNKYDPRPGGLHTEYPLQIVQIDHTPMDVILVDDVHRRPIGRPWLTLAICVYTRMVTGYFFSMDAPSAVSVAMCLVHSILPKERWLAHHNVDATWPVWGKMGTLHSDNGADFRTHSLVQSCILHEIKREFRPKKKPHWGGHIERLMGTFAGIAKKDKGATFSNPVERSEYDSDEKSTYTFAEYEERLVKNIIIYNNKYHEEIDCSPTHKWNTAFFGDKENNALLPLPPRIADPWAFQLEFLPSARRTIRPDGVEMDAMYYAEALRPYVGALDPVTKTPRKFLFRRDPRDINRIWFYDPGLREYFEIPILRGRYAGVTVSEYVAAKKKAKQMGRNAVDHELIERLIEENRQQELEAAARTKQARKSTQKRTNNAKQSTPAKPKPEVPVAPPIPVVVPGLLSIDDVETFGDVW

SEQ ID NO: 5017 - protein, 182 aa, synthetic construct
  REGION 1..182: note = TnsF-Tn7 System Protein
MTMTDISILLISGPLAVGKTSVRETLVAHHGYLALQSSTFLRELASSRGIPSERASLQTLGDFLDTETQFSWVVKSVALPQIQENPDRKFWVFDAVRKPEQVALFREQFGAAIRHVHLTCSESVLKQRYELRGRQEDSVSYEVAVNHPNEVASRNLSRIADQIFRMDDLTSEEVSKIIVERR

SEQ ID NO: 5018 - protein, 206 aa, synthetic construct
  REGION 1..206: note = TnsF-Tn7 System Protein
MAHHGVLFLDELPEFDRRVLEVLREPLESGHIVISRARDRVRFPARFQLVAAMNPCPCGYLGEPTGRCRCSTEQVQRYRNKLSGPLLDRIDLHLTVAREATALNPDPTTSENTASAAAVVAEARDRQQRRQGCANAFLDLPGLREHCALSSVDESWLETACERLTLSLRSAHRLLKVARTLADLEQVDTISRSHLAEALQYRPSNN

SEQ ID NO: 5019 - protein, 372 aa, synthetic construct
  REGION 1..372: note = TnsF-Tn7 System Protein
MDAPNQCRWRACTYPVKAVWPFVPPLLDDEIISSWLVRCALKHGCEPLVLTNHLWPGYRIWCIDPDRSLSSEHLAALSRLSGLTSEALNASTMTAVHQCIAGETVFPRGVATWFLCLGIRNRRRCSGLQYCPLCFAQREPYYRIQDRCAWHTSCPVHRVALLDCCDRCHAPLCPQLIGPPQESIGRCHRCAFELCSAPVVPSLASAMSFQVATDSLFDGLTLRYGNSRLNLIEWFELAHWMLGVLRSAARNHGSCISGFFDRLDVCVETLHPPPTGLPFEYLAPGERASLLSNVWKMIQAGPDKLISAAVQEEIRRSLLIPRSGRLPFALVELETVLKVSQRGRGGHLHSGSPRSPSSVLMRWNRLLRKFQR

SEQ ID NO: 5020 - protein, 1122 aa, synthetic construct
  REGION 1..1122: note = TnsF-Tn7 System Protein
MKIAEVLKTALCFRTPEGARGAHSVHAYRWQRWCKAAIDDASRAGNRRLHIEIFAALKRDVMLALVAIGVHTAAAFGAAVTLKSLLIQLMRADSSVLSNITQGTTCLLLIYCAWLALNHTFFLAELVGVGSRSYVEQRVLIKRTVAQNGVFALSLTTLLDREAARVESSWSGLITIALALATVLFTSAFFFLALGASAVAALAVIAGSSMIVFWVAQRLGATYEQLSLSATQRIEVGVFATKNRRQAWLRNWNAELIREYAAKRNLEEGSLKKAARLVAAISLISTMTPITALLSSALLQLIYLGQVDTPGVLAAIALIGGLKSVANNIPDIVQSISQGFVGHRHIEQYLDAPGPVNPPCATSIPPSTKAKHIAIVGAAGSGKTSMLRNCAQRFPGADDQAIFIPDEPWIFAGGLGENLSIYRREFSDEEVQEAIALARLPGDFYLDYIRERDCGAIKQWDVSRGQGKRIELVRALVARTDWIYIDQPTSGLDDALAAGLLRTLLDGPWRDTNVMFVTDKPEERDTAEEIWTVSGGRIIDIKTHHACASSRPLASPVASSFSASSPPKAVHSKNNSTEQPERVSRSITSSLIAFGTGAITLVAFTLMALKEVLTIAGDYLIASGYLGTHLNASLLGLAGVLLVSALLSISGALVTAKKCIEAASAHCNRYLSYLMNPGLDERLTQKINHDSQNKLTWDQRRVDEVLPVLLLETIGAATLLSVTAGYVVLNNIYVLFPFVFISLCYWRGARRSGELLKKSNTREIDTTALLFTRIQALSWDGGRFESMARNSSILNWLSGNLAARAFASLDNAAMRRWYSYKLDLMGVFFLSGIVASTIYFHAIGVATMANVLAVSLSYSLIAIFARLGRCVVELRQVLDSADRLVVAGLLPTAAPRCQYVQNGAPLVSFSNVTFVNPHSGITVLEDFDHAFHENDVVVIMGASGVGKSTFASLVVGSLLPSQGQVSTLGGTIGYLTRPHAEDVQLLTSSPIFKPGPLFEHFNSTSQEELYQQASYLGLSSIIERLPEGFNQEVAWSGDVNLSKSELQRLALLDLTINAPSIAILDEATSELDSVEELQLIRKLMAALPKTLFFIITHNAELSALGNRNFTFNSEKRLVEKTI

SEQ ID NO: 5021 - protein, 1122 aa, synthetic construct; identical to SEQ ID NO: 5020
  REGION 1..1122: note = TnsF-Tn7 System Protein

SEQ ID NO: 5022 - protein, 297 aa, synthetic construct
  REGION 1..297: note = TnsF-Tn7 System Protein
MTDYAHIALQFKEVMLKTDLERLDFLEESRWIEYQAATKLRAILDGLLRVPDRTRMPNLLVVGQSNSGKTSVVTRFKNTTGTPYVSDDAVSVRPVIYIEIHKPDERELYSAILREFWAPHNPAAVLSKLRDQALHLMRKARTRMLIIDEIHTANNGTPRKAMDVMNEIKMLSNTLHIPLVLVGTRTALQLLMLDPQYTSRFEVVALPEWTVNADLQRFLKSFESVLPLKKPSRLFSPELTPVIHRISGGNTGNIEYLLRECAKEAIRTGSELIDRSLLEKNSWMRPTSADGVRVRTL

SEQ ID NO: 5023 - protein, 297 aa, synthetic construct; identical to SEQ ID NO: 5022
  REGION 1..297: note = TnsF-Tn7 System Protein

SEQ ID NO: 5024 - protein, 809 aa, synthetic construct
  REGION 1..809: note = TnsF-Tn7 System Protein
MTARHERAVSDPIGLITDLVAAVEHQLESERIHAVATAVAGGRAKSRRLASALADRPGVLADGRSPASRAVGELLLALREAGATAVSPPCCAQCGKRLRSLQRRGRDWYCAVCGPRSEPCAACGNTRPVASRDRAGRPRCQQCPDLDGRDPITVIHKLVAGLDPDADRVTVAAAVRQSAPRPSYQQKLAWVLEDRPSLLTGEGHLAPLRAIPRLIDLLHAAGVAGVVRPSCPGCHRVVRIDKPLDGMRVCRTCIAHSRLQECARCGARREPVTRDDHGKPLCANCFVTDPANLETCVGCGRRRSVGHRTPDGPLCPSCPGLALLTCSVCGETTPCGVSRATGKPWCPSCHRRSAACSTCGRHSAITSGTLSHPLCADCTAPAPWLDCPTCSDPDQPHPGQCARCLINRRLDELMGPSTHSLPPGLQALRRDIATTEHPITAMRWLTKPPIASVLSDLAAGRVPLTHEALDELPHSQPLAHLRQTLVAVGALPERDELMVRLEAFLADLLASQPDTERRNLLRRYLIWHLIRRLRSRNNGRPTTRQQSLMVRRLARGAVAFLDWLHAHDLTLATCQQADIDHWATDESGTYREEAGRLIRWARATKLTTAHVAATSWNGPAQLLDHQHRWDTARRLLHDDTLKPENRLAGLLVLLYAQGATAISRMTVEQIQASTDEVRLRLGRAPIHLPEPVAALVRTVVANRKGHATIGARAPSPWLFPGGQPARPISSARLTQRLHNLGIRPSQARSTALFQLATEIPAAILARTLGIHTDVAVTWQRHAAGDWAAYAAEVSRRDSPPARHSDSLNI

SEQ ID NO: 5025 - protein, 809 aa, synthetic construct; identical to SEQ ID NO: 5024
  REGION 1..809: note = TnsF-Tn7 System Protein

SEQ ID NO: 5026 - protein, 348 aa, synthetic construct
  REGION 1..348: note = TnsF-Tn7 System Protein
MVEAMPRGWRAQQHARGLREGTVAPRERLVRQFLDFTNEYPWRWTASHVDEWSLSMTSERRLAPSTVRGYQTDLRLFTEFLADNARYGWVSACEREFGPGVHPVAIVHEWNSIAHLQAYEGNPEARPFSRAELQRFLDYADDQVERAVRAKRKGALAAYRDATVFKVMYGWGLRRTETAKLDVSDWGRNPEAPEFGRYGSLRVRYGKAKRGQPPRRRNVLSMFGWAVDAVDDYVENIRPRFGCPDHPALWVSERGGRVRPPEINARFESYRDALKLPKSLVPHSLRHSFVTHNTEDGVDRRFIQVQVGHECDSSTAIYTHVSDDFMNTMLRKALAPALDPTASTDKDR

SEQ ID NO: 5027 - protein, 112 aa, synthetic construct
  REGION 1..112: note = TnsF-Tn7 System Protein
MAPRLDYRWHLRKVMADRGLFQTTDLIDPLAKRGVSLSSSQVYRLVTERPERLSLKVLMALLDILDCSMDELIEPVAVAGGAAARRRKAVGAEAGVGELRPKRARIDGVGRP

SEQ ID NO: 5028 - protein, 798 aa, synthetic construct
  REGION 1..798: note = TnsF-Tn7 System Protein
MITDPVGVMVTLILQREHTLDAATVTRIVESKAGGRAKRRRLAQALLDRPGVLDDGRSPAPRAVAELLIALKRAGAMRISAPSCTECGKLMRTIQRRGDNWYCRVCGPVPEPCAGCGVLRPVAWRDRDGGPRCKACPPDDDRDPIDIITAVIAAIDPTLPENLIADAVKAVSPQLGPRRRLAWTLEDHPELLTGAGANAPIPSVLRLIDRLCDAGSATVIHPACPACGRTIHLHRPIKGKWLCRNCTAKSKAQPCARCGVLKEPAFRDENGQPLCPNCLQRDPANHEPCSGCGRLRPVALRTADGPVCGSCRTETIQRCSICGTTAPCSISVATSQPWCRACRQRWIRCSTCGEVRPLRGGTLEQPLCATCTRPEPGFWHSCADCGESGRIHNGRRCARCNRERRLRELLGDEHGQIRAGLQTLYRTLIQVERPNTVDAWLRSNGAPAILRVLNSGNRTLSHETLDELPQTKSLAHLRSVLVSIGVLPHRDEHMARLHRWTTDLIATRSDPDERAILQRYAFWHVIHRLRRRAGDTDITHPQVVAAQAVIKGAATLLDWLHSCGHTLTTATQADLDAWLIDHRTDAGNFVRWARKNKLTQLDYAATRWDGPVGTIDSETRWEQARLLLHDNTIELGTRAAGLLVLLYAQHVTMISRLTVEQVSITDEHVLLRLGDEPIDLPEPVAELFRELVRHRRGHAVIGRPATTTWLFPGGRPGQPIGADRLRERLRQLGIHSGHARSSALFQLATELPAAILARMLGIHISVAANWQRVSSGDWMSYATDVSRRSDQQHPDPTR

SEQ ID NO: 5029 - protein, 798 aa, synthetic construct; identical to SEQ ID NO: 5028
  REGION 1..798: note = TnsF-Tn7 System Protein

SEQ ID NO: 5030 - protein, 347 aa, synthetic construct
  REGION 1..347: note = TnsF-Tn7 System Protein
MALAVVRDLGTARPPAGPEELAAFETDVLAGFVLARASAGLADGTIRGDMSHLEQIRNSFGRPLWEMRPADADAYFGRVVRSASQGTRLAHAQSLSTFFDFLEMRYRAELHAMTGTVITSPLDEMNRPRGRAEIGLRIPPVDAEIETLFTGWREELATCRKFATAARNFTAAQLISKVGLRINEARCLDLDDVRWELGRFGKLHVRFGKGTQGSGPRHRVVPLINGADRLLRWYIEDVWGHFDHDHTRPGAPLFPSERHHADGSAARAGAESLRRGLAHAVAGHLPTWTERLTPHVLRHFCASQLYRHGMDLLAIQELLGHWWVATTMRYVNPRELHQTGEFSQVAC

SEQ ID NO: 5031 - protein, 106 aa, synthetic construct
  REGION 1..106: note = TnsF-Tn7 System Protein
MRWNLRLAAANRGIWKASELQRMLAERGLVISAGKMSGLWSGQPISVKLADLDVICAVIGCGIDELLIPEPETAAASATEHTAQPAVGQSHAVTPRAPRGRSLPPT

SEQ ID NO: 5032 - protein, 347 aa, synthetic construct
  REGION 1..347: note = TnsF-Tn7 System Protein
MVDAMLRGWRAQQTARGLQENTIDPRERLVRRFIEFTNEYPWNWLPGHVEDWTLWMTSEKHLAPATIRGYQTDLRLFSDYLCDARYGWAAACEDQFGIGKHPVPICHEWNTIVHLNDYEGDPEARPFTRTELQRFLDYADEQVERAVRAKRKGALAAYRDATLFKVMYGWGLRRTETSKLDVVDFGRNPKAPEFGRFGMLHVRFGKAVRGQPPRRRNVPSVMGWAVDAVADYVEHIRPKFGSHEHPALWLTERGGRVKPAEINARFVTYRDALKLPKYLSPHSLRHSWVSHLTEDGVDRLFIQQAVGHRCDTSTAIYTHVSSDFMNTALRKALTPALGRPAPDRKDA

SEQ ID NO: 5033 - protein, 110 aa, synthetic construct
  REGION 1..110: note = TnsF-Tn7 System Protein
MARKLDYRWNLRQMMAARDMFQTTDLSEPLAQRGIRLSSSQVYRLVTERPERLSLKVLMALMDILDCRMDELIEPIAAATPTRNKRTATGEEAGIGTFRPKPARITDSGE

SEQ ID NO: 5034 - protein, 332 aa, synthetic construct
  REGION 1..332: note = TnsF-Tn7 System Protein
MKTEPIFQQVRKIKPTRLSVSGLLPFKDGVSIPYESTLERDLLLYFTYMPAVEEIISQPVRILFVKNRMTYPYTPDFFMRKCGIGVALRKGSDFMRFFIDCDDIWQKIPDYAELVTHFKPNGLRANLTVLRWLLDTNQVAVNKTLKDDLAELERIQALFNKLKESIPCIASYYQKLQRRCDEGKTSLKSVRLALQPAIDLISTNEITDYPTQDQLNQYLVEKSGQTAAITGFINHLKSEYHRELEIDRKLIQQIRAKQLKKHCSQRLIELYKQAYLTEKEQMELVSVVLYSLHNITIKTPKRKNIIKIDQVAYYRYENRDYFLPQDIYKHIT

SEQ ID NO: 5035 - protein, 443 aa, synthetic construct
  REGION 1..443: note = TnsF-Tn7 System Protein
MSEMTPREIVSELDQHIIGQSEAKRAVAIALRNRWRRMQLQEPMRYEVTPKNILMIGPTGVGKTEIARRLAKLANAPFIKVEATKFTEVGYVGKEVDSIIRDLTDSAMKLVRQTEIEKNRVKAEEAAEERILDALLPAAKNQWGEMENRDAQNNTRQIFRKKLREGELDDKEVEIDVAGVPMGVEIMAPPGMEDMTSQLQSMFQNLSSGQTKKRKMKIKDALKTLVDDEAAKLVNPKELKQKAIDAVEQNGIVFIDEIDKICKKGEYSGADVSREGVQRDLLPLVEGSTVNTKHGMVKTDHILFIASGAFQVARPSDLIPELQGRLPIRVELSALTAGDFERILTEPNASLTEQYKALMATEGVNIEFTQDAIKKIAEAAFRVNEKTENIGARRLHTVMERLMDKISFNASDMDGQTVSIDAAYVSEALGDVIENEDLSRFIL

SEQ ID NO: 5036 - protein, 443 aa, synthetic construct; identical to SEQ ID NO: 5035
  REGION 1..443: note = TnsF-Tn7 System Protein

SEQ ID NO: 5037 - protein, 582 aa, synthetic construct
  REGION 1..582: note = TnsF-Tn7 System Protein
MSYFNENKLEKVRWRCSLNLEKYFEKPLRGFYNKEHEYVATWYENRLSLDKSKTLVEVTFINLTNPTYINKKTGEECQSFFRIALPINYLHKVPFGSIWKNGESECKFKLKEFKVTFSKSKGLAYKALWTDKESPHPFEADKYVHSSYLRTFKGDGNRLLVIKPEGDSKSYIVHPLHFFMAHYGYSSELKRILITDNWSKVEKKLRLNEFFKEKGVFVPNNLSTKDAVFLYHLKYDAYTKKVVKSVMADVILSKGKEKPNYLIPCWHDKPIMLSFYGIELGNSVLCCQITGISQPQGEPINLYYHSAIKTNKGGKGQKDGEPQYRTRKQEREHELEKLDIALDNVNNLVTADVIEHLKLLGEERTINRIQLVQEAEKGGKVKFLNYDEPENYGVGEKQGKTGNTGMANCFYDIPSNQKIEGKSRLNTVWEHAKRLRNEQGAKVYWYTPKLGFNESDKFTLVSLDEILDSLEQYYPAAALILRVDVQQRTFFVLSFPARNEKENSGFSSVVYETQNIQQFLSSEGDVYSRNDNLFKLFIEIVSSGGVNSDYVDSKDGKMSLFRHKEAKKTNNNWVWNGIIKLL

SEQ ID NO: 5038 - protein, 332 aa, synthetic construct; identical to SEQ ID NO: 5034
  REGION 1..332: note = TnsF-Tn7 System Protein

SEQ ID NO: 5039 - protein, 204 aa, synthetic construct
  REGION 1..204: note = TnsF-Tn7 System Protein
MSYIKLNYHKTHFLTSSPNLKSLPEDTGIEIAFAGRSNAGKSTALNALTNQKNLARTSKTPGRTQLINLFEVEPQCKLVDLPGYGYAAVPEQMKLQWQQALGEYLQKRECLAGIVILMDIRHPLKDLDQQMIEWAVASQLPVLLLLTKADKLSQSERSKQMKMVREAILPFRGDIQVEAFSALKRTGIDRLAATLDGWFAPVFA

SEQ ID NO: 5040 - protein, 204 aa, synthetic construct; identical to SEQ ID NO: 5039
  REGION 1..204: note = TnsF-Tn7 System Protein

SEQ ID NO: 5041 - protein, 765 aa, synthetic construct
  REGION 1..765: note = TnsF-Tn7 System Protein
MTSGADIEKRQAAVADLAGLLAERLPDADIDELTEQIADVHLTAPQARAVLDHLRAYPHGLTSGSSEGPPGLERLLAALAERHPQVQRMRCADCGDVRALPYRRSGAKICSRCYGRTHLIVCVRCGRQGHPAVRDPDGGTVCIRCVRADPTRHEPCTRCGKTTTVAYRIDGAPLCQNCGPRKRHTCSGCGRTNQIAHAITDDGPLCPRCYRRDHVHDCGRCGRSTRNVRVDDRTAGTWICYRCWTPPTAACSSCGKEKPCDRRTTEGRPICSSCRARQRPSHRCAQCGNVRPIHTTLPLGRICGPCYRRLRGNPEPCTQCGQRRPLVAHDGAGGRVCGPCSGDDRNWYCVRCGRVDLLVGGTHCLACDTHLRSRQLLTGPDGRISAQLTGLHALLTEPDAVESAHRLLAGNSTWIRLLRELVAAGDPISHTVLDHHGTDIPVEHLRSILLHTGALEPRGNAVDSVAPWLDTLVADLPTDLAATVRAYASWSVLRRARGRAARGHLSVSAPKYARVRLQVAVQFLTWLTDHHRTLTEATQADVDRWLGEGASTRHRLRDFLRWAHQHDRAADLHVSWLGRDGLPSQLLADDERWSALRRCLTDDGLDLRVRVAGALVLLYGQIPTHIVELTTSDLGIDSRGDSTLRLRDRPVLLPPALAALTTELTSRPDRRRRGARSSTTPEWLFPGLRPGAHLDSGRLALLLRTAGIPVRPARGAALAALAADLPAPVLADLLGISVSAATRWSALAARDNAEYLAARVEHPPR

SEQ ID NO: 5042 - protein, 765 aa, synthetic construct; identical to SEQ ID NO: 5041
  REGION 1..765: note = TnsF-Tn7 System Protein

SEQ ID NO: 5043 - protein, 108 aa, synthetic construct
  REGION 1..108: note = TnsF-Tn7 System Protein
MTKKLGCRWHLRNVMAEHDMFATTDLVPLLAERGVHLSREQVYRLVTKTPQRLSLDTLAALCDIFDVGVEDLIEVAVTDEPIHKKVSGTHATPPPPVRRTTIRRPRGL

SEQ ID NO: 5044 - protein, 320 aa, synthetic construct
  REGION 1..320: note = TnsF-Tn7 System Protein
MNAELIEQYWVRRLFVDFCRSPVLEVSDGALVGRLDHYAQFFAEIDRHLSDWKEVSQESLYRIFTAEGLRRHYLPVSYLVRRLRLPWSNDDLAELIERDRRLQALQRLGDRVWVGTLHEYADWLSRDTQAKLREKSIRVYVNAAAKLLEHAQVERPTELDAKHLTRFLRRHPGHRASLTRFVRFLKVQHGLSIALPPGRPPRKNRYASRVEHTVRQITTALERPCTAAKRRALVAELLARLYGVPLTRVLALTRSEVTHQGHKVVLWPGESDIRLEEKVARLFRESVLDEARGEMLFPGRNGVQPLSTHAVKYYVRQHAG

SEQ ID NO: 5045 - protein, 358 aa, synthetic construct
  REGION 1..358: note = TnsF-Tn7 System Protein
MIPARWAFRLRPRPEELLSSYLCRVAFAHGSQPYRFHRLYWPRMELWTRDIDRGVPLAVLAAACKTSGLSLPEVTDLTLAPEQAALVKNASIPGVTPFVLSLGIYHRARQHHGQQFCPDCLAEGSGFIKRWRLAFVFGCERHRRVLLDACPHCGAPPAPHRNLIPRLEACERCHGLLSAPAETAAQPSASAWALQRLLLSAAGVRASEARQDVDAYPQGSAATYRSLFSAVGDPRIHARLRASLGLPGLPEGSLERRRLEHRRVEQRALLIETVAAWLSNWPEAFRVGAQESRMTQRVFARLHLDGVVAAEIARLPSGQQRTRVTRSARPAAAWQRRKREKLEAYRERRARALLKSLT

SEQ ID NO: 5046 - protein, 249 aa, synthetic construct
  REGION 1..249: note = TnsF-Tn7 System Protein
MRDWPKQKQKILRLDLEGPVRRIGRSRRSVTGQAHVRGRSVRFESSLECDFLNIVDFDPTVTEVIEQPLRIHFQGTDGRLRHYTPDFLVRYLDAPAGLFEIKYRENLWAQWKDRKPAFKAARQYAKKNGMTFSILTEVEIRGSGYLGNAKFLRGYIHRPEDRAMEEKLVSTLVVLGESTPAALLAACFYDKTNRMKAIPSLWRLVAINRVNADLTQPLTMNTPIWIQAGEGFVWNDPHSYQFDLDQSLF

SEQ ID NO: 5047 - protein, 610 aa, synthetic construct
  REGION 1..610: note = TnsF-Tn7 System Protein
MERLRIAQLTSVHPAEEAGEAVAAGKDIAEISEEDWAEAQRRFDAIKPLLDNPMRTREAAEAKAKEAGVHVATLYEWLRRFQDSRHLSCLIPGRRGPKRGGRRLSKKAEAITESVINQYYLSNQRPSPGDVAARVVEECKKAGLKPPHPNTVRNRIRELPRAVSLRRRGRRDEARNMFQPIRGGFPGADFPLSIVQIDHTEADIIVVEEETRLPMGRPWVTLAIDVYSRMVVGIYISMDPPSAVSVGMCLANGMLPKEGYLADLDVPGEWPVWGKMRVVHADNAKEFRGAMLQRACEQYAIELQLRPVKLPHYGGHIERLMGTNAKQIHKLPGTTFASPAARSGYDSEGKAALTLREFEQQLVDYIVNVYHQREHSGLGLPPKRQWEIGVLGNDEQPGIGVPDIPADPARLRLDFLPYVMRTVQTYGIQIDKIFYFHEVLTPWINAMDPSHPKAKRQFIIRRDPRDISRVYFFDPEANEYYTIPYRNVAHPAVSLWEVRAAQRRLAEEGRKHVDEDAIFEAVQRMRERVEEAKHKSKKARRQAHRVRASTGGASRGSGKGKRKSPAGPAEPSGKRLPVENDTNAAVNTDLAEDDLFSEPVTAFDDLGVER

SEQ ID NO: 5048 - protein, 229 aa, synthetic construct
  REGION 1..229: note = TnsF-Tn7 System Protein
MLSIERLNQYYGESHTLWDVDLEVPSGACTCLMGRNGVGKTTVLKTVVGLLEARSGEIRFDGRAVQREPTERRARAGIGYVPQGREIFPLLTVEENLRIARAAMGRRDIPALVHELFPVLREMRHRRGGDLSGGQQQQLAIGRALCLEPKLLILDEPTEGIQPNIVREIGDIIRRLNREQGLTVLLVEQKLPFARRTADTFCILDRGRSVAAGPMAELGDDLVRQYLTV

SEQ ID NO: 5049 - protein, 229 aa, synthetic construct; identical to SEQ ID NO: 5048
  REGION 1..229: note = TnsF-Tn7 System Protein

SEQ ID NO: 5050 - protein, 273 aa, synthetic construct
  REGION 1..273: note = TnsF-Tn7 System Protein
MRRTGPSKSSRRIFCFCLGQSRIPLSSSRGITCAKQCNPLFNSTMIASSTVFYSGGRPRPGEISLAHNGVLFLDELPEFSRAALETLREPLETGAVTISRAAAKLTFPARFQLIAAMNPCPCGHLGDPIEPCRCSPDQVNRYRGRLSGPLLDRVDLQVDVPRLTALELAGSDPGEPSAAVRARVIEARERQLRRDGVPAARLTPAALARSCQPDTAARRLLTEAAERLRLSARAWDRCLRIARTIADLAGADQPGEAHVAEAVSYRERLSAGG

SEQ ID NO: 5051 - protein, 278 aa, synthetic construct
  REGION 1..278: note = TnsF-Tn7 System Protein
MSMLARTREVMRRDQVFDIVRPRQDLDARLDTRHGPILYLEDVTVSFDGFRALDALTLYIDDGELRCIIGPNGAGKTTMMDVITGRTRPDSGRAFFGQRLDLLRLQETEIAQAGIGRKFQKPTVFPSHRVVENLELAMAGDRRVWPVLGARLDSAARDRIAAVLDEVGLADVAPRPAGELSHGQKQWLEIGMLLMQEPRLLLVDEPVAGMTHQEMDRTAELLTRLAGRHSVVVVEHDMEFVRSIARKVTVLHQGSVLAEGSMAEVQADPRVVEVYLGE

SEQ ID NO: 5052 - protein, 278 aa, synthetic construct; identical to SEQ ID NO: 5051
  REGION 1..278: note = TnsF-Tn7 System Protein

SEQ ID NO: 5053 - protein, 296 aa, synthetic construct
  REGION 1..296: note = TnsF-Tn7 System Protein
MKSLEHLEWEIRDTVDLPLSARIHELRRDRWIGYSRAQQAIDALSDLLMYPRTLRMQNMLLVGESGNGKSTIISHFESLYPSYCRDNGHPEVPVVVMNMPSEPNESRFWSELLLQLMIAHRDTDPVQRKKEQALSVLEYVKCRMLVIDEIHNILYGHARAQRHFLGVLKNLSNALKLPIVAVGTRDAIRALHTDPQISSRFAPFGLARWKLDREFLRLLASFERLLPLAEPSNLTNRETAIKVFNMSEGLIGGVSGVLKAAAVHALREGKERIEPQMLDEIEWVSLKNYGEQARAL

SEQ ID NO: 5054 - protein, 296 aa, synthetic construct; identical to SEQ ID NO: 5053
  REGION 1..296: note = TnsF-Tn7 System Protein

SEQ ID NO: 5055 - protein, 292 aa, synthetic construct
  REGION 1..292: note = TnsF-Tn7 System Protein
MNLTAAIFRHEWAAPLWTRFGTWLHDQNPAKPNLITVLRSHQVFFERIDAAFVSVLDMTQASLLEQFGTATLRTHLLPTRFLAEQLNIQISEEAKLQSAEQSRIDETLIAANRKPWGDLLRSYRKDIDAAELSLRSIRMYLATANQFASYVDLGAAPWSVGQIERFLVEHSGARNNLSRFVSFCRRTQEWDVSMPPKGGVSLAPIKDPLATSNRLAGLMTSVEEAGIENANRMTIQKILATALGISLNAIKALSANEFTSSKAGLSVCIQHEQIHLPEELIPYGQRLLRFLQ

SEQ ID NO: 5056 - protein, 199 aa, synthetic construct
  REGION 1..199: note = TnsF-Tn7 System Protein
MANSDRVGFESSLERDWLICLDFDPDVVVIREQPFSLYYEVDGRQLRYTPDVLVQFRLPDGRLRTEVHEVKPLEDLKADFQLFRPRFKKAIRFCREQGWHFKICTEKHIRTPYLANAKFLRKYRRMSTQELYRDQLIYSMRALGPTTPQALLALAYTYHEKRMAALTELWRMVANREICVDLTSPLNMHSRIWLGEVNE

SEQ ID NO: 5057 - protein, 367 aa, synthetic construct
  REGION 1..367: note = TnsF-Tn7 System Protein
MGRDIPPGVDQNQWQFRIVPANDELLSTYLVRRAHCQGLSPHRFMERGLPGVQIWNRDIDSSLSAPVSARIAQYCNLAEQDVKAMTLYDLVGFDSPASPDWLLYQSWINAVGIYHRLRRRFGLQYCPLCLQAQPVFQRAWRLAFVFCCPEHGVFLRNCCPSCGTAVMPHRARIDMTRCWKCGALLSGGTVVESTAVPVALETQRLMMRCIEDDEISLGSTNVARSEYLCAAVTVLRVVKEHMHSHPSLWSFDVPIDAVHAQVKFLGMPERLSLFTMLLEVMDDWPANFLHFSSVAGITQIAFGRRRNVPQWMNEVVAQLPARLRSRTGAMEANFVRYVRRLENEGGTKCRALRAQALMLAAKGKYGN

SEQ ID NO: 5058 - protein, 639 aa, synthetic construct
  REGION 1..639: note = TnsF-Tn7 System Protein
MNKIPKGFLTAKPGQRVSSGGKNYQISHLVTVSTVFAVNEETKESTRLDIESLRPPIDVAADADGDSEDKDILLYSKEDWAIAQQRLHAIKPLLQIPVRTRANVEQLAQERGLHVATLYKWLKLYQSAGHVSALVPTKRGRRIGTFMLNAEQEKLIEEVINDDYLTKQRKKPQDIIDEVQRRARLAKIDSPSGNTIRKRIQLLPQAETLRRRGQKEKARNMYDPILGEFPEGEFPLQVVQFDHTPGDIILVDEVHRQPIGRPWLTVAIDVYSRMIVGLYVTFEPPSSTSIGLCVAHAICPKREYLANLGVSGEWLVWGMMNSIYVDNAKEFRGAVLERGCDEYEIDLQWRPVQKPHYGGIIERYMGVLANQIRKWPGATFSNPAQRKGYDSEAESALTLKEFEAMLVDFIVNVYHQRMHSELGMPPRKKWELGILGDATTPGVGVPPLTVDPLRLQLDFMPFFERSVQQYGIQIELINYYDPVLIPYINSTDPDNPNLRRSFIIRRDPRDISKVYFFDPVEKSYFPIPYANVGRPAMSAWELKEVKRLLTEQGRKDVDEDTIFEALGRMREAIEGALEKTKAARRQATRTPKAAPRQEKLAGGDVAVPGESSKPTRAMDDDDDPFAQPIQPFENVSLIR

SEQ ID NO: 5059 - protein, 295 aa, synthetic construct
  REGION 1..295: note = TnsF-Tn7 System Protein
MITVEHLDSEVVPVLELPKDERIAYCKTDRWIGYSRAQEIMDKLDQLLVYPKSLRMPSILLVGRQNNGKSSIVARFSSRNPVQVSATGSPIAPVLKISMPETPSESDFWSEILWSMMISHGDRDTVASKKKEAKSILIYAGIRVLVIDEFNNLTTAGKAAGDLLTAIKMLSNDLKISIVAAGTQAAINALNLEPQMKSRFEPAALDRWKLNVEYLRFLTSYEKLLPLAEPSNLASREIAPLIYAMTGETIGSTVKLLKEASSFAISSGKERIDEKVLKAMTWTREDEWDEISRRV

SEQ ID NO: 5060 - protein, 295 aa, synthetic construct; identical to SEQ ID NO: 5059
  REGION 1..295: note = TnsF-Tn7 System Protein

SEQ ID NO: 5061 - protein, 800 aa, synthetic construct
  REGION 1..800: note = TnsF-Tn7 System Protein
MEEISEVVSDPIGVIIGLITDIEAGLDRCQVEAMVMGISGGRAKRRKLAQALAERPEILTDGRSPAPRALGDLLIALVKAGATTISPPICAECGKKLRTLQRRGEDWYCWLCGPIRLPCANCGDVERVHSRDRDGQPQCKKCGPGTGADGGSDPVEIVIEVVTALDPTLPPQAITAAVNTAATQAGKRHQLAWAVQDRPGLLTGAGAEAPVPAVLRLIDKLCDAGACGIIRPPCPHCGRVIKLHRPIDGRWLCRNCVAKSRAQPCSGCGRVCEAAARDDHGRPICPNCLVSHPANLEICVNCGRRRTVNTRSPHGPLCPSCPTLPTATCSICGQHRPSGTSRLTGQPWCPPCQNQSARCSRCDLVKPIRSGTLDDPLCHSCTVPVFPDCSVCESSPQPGRCPDCRLELRFRELFTGGDGVIHPVLQPLKEALAATDPPGTALRWLAKEPVAQVLADIAADRRPLTHAELDDLEQTAILAHLRSVLVATGTLPPRDEHMARLEQFLDEVLATQSDPDQRQILHRYAVWHLLRRLRRRTGGHATTIQQYAVVHQHTRAAVVLLDWLTTQHLTMATCRQADLERWLASGEASHRYQAGHFVRWSVGQRLTTLSFPATRWHGPTRVLDEESRWEAARRLLHDDTIGNRDRLAGLLVLLYAQPVARISRLTTDQITIDGQAVRIHLGSAPITLPEPVADLTRQLLDGKRGHATTGTGNPSPWLFPGGQPGRPISATHLGKRLKDLSIQPGQARSTALFQLATELPAAILARMLGIHIDVAVAWQRASSGDWMTYAAAVSRRRKDS

SEQ ID NO: 5062 - protein, 800 aa, synthetic construct; identical to SEQ ID NO: 5061
  REGION 1..800: note = TnsF-Tn7 System Protein

SEQ ID NO: 5063 - protein, 746 aa, synthetic construct
  REGION 1..746: note = TnsF-Tn7 System Protein
MSMPSFAELLRQHRHAARLTLEQLAEASGVSARTLSDMERGRSKGPQHRTVTALADALGLGGTDRKQLIEQAREGRLRDHWSRPIGLCELPRSVDDFTGRAAELAWTDDFVRTGDTPGAAGVALITGAAGLGKTTLAVRAAHALRPVFADGVFFVDLLGMSPQPLTADEALAQLLRALGAPEGQVPHDTPARASLYRSSLRERRVLVVLDNARSEEQLRPLLPGGGTSRVLATSRRLLAGLEGVRRLSLGPLLPAEATELLTGILGGSAGADADIGELARLCGGLPLALRIVGNRLASRPGWRPGELVERLTDEERRLDQFKAGDLKIASAFAMSYDQLGDLAQQGFRRLALVPGHDFDSALAAVVAGTSIEDAWDALDELVDLGLLQDGRSGHYRFHDLVRLFARERLHTEDSPAERETITQRMASWLLRMATLAGRWFEPTYGAPEQPEAGLASPEDADTWLRLNVDNWMGALRHAASRGQHAVVLECAESMHWFSDRWMHGLHWQEVFTLGVEAAEALGDLEQQATQLNYLAWVRSLPPGDPEATMWFANRALNLATRCDATAQIAWAHCYLAAALRKLQRLDEAAESYAQASEMFQAAGDMNAYCQTTGGFGDCLLDAGRHEEALKQYLAIRALLEGEASGVTPSIAAVTLAYTAARVGGCLRALGRRAEAIDAFAEAASMMEDLRFGNFSQARILQVLGDMLVEEGRTAESRQAYSRAAEVYEAIGEADAAGHCRTLSSAG

SEQ ID NO: 5064 - protein, 746 aa, synthetic construct; identical to SEQ ID NO: 5063
  REGION 1..746: note = TnsF-Tn7 System Protein

SEQ ID NO: 5065 - protein, 366 aa, synthetic construct
  REGION 1..366: note = TnsF-Tn7 System Protein
MELVSGVVQLRPEDAMVEAMLRGWRAQQTARGLKDDTIVPRERLVRRFLAFTNEYPWAWSPGHMDEWSLHMTAEQHLAPSTIRSYQCTLRQFTEFLIDGRYGWAVACEQAFGPGRHPVAIAHEWNTIAHLNDYEGNPEARPFSRQELQRFLDYADDQVERAVKSKRKGALAAYRDATLFKVIYGWGLRRTETAKLDVVDFGRNPAAPEFGRFGMLNVRYGKAKKGQPPRRRNVAAVMDWAVEAVVDYVENVRPRFGCEDHPALWVTERGGRVKPAEINARFVAYREALKLPSALVVHSLRHSYVTHLTEDGVDRRFIQTQVGHESDSSTAVYTHVSDDFMNTALRRALGPALDSGHGSRPGRKDQR

SEQ ID NO: 5066 - protein, 109 aa, synthetic construct
  REGION 1..109: note = TnsF-Tn7 System Protein
MTAKLDYQWHLRQVMATRGMFSTTDLLQPLSERGIKLSSSQVYRLVVDRPERLSLKILMALLDILDCTMTDLVEPVPAAGQAKKTKVAGSETGVGELRPRRARITRADG

SEQ ID NO: 5067 - protein, 620 aa, synthetic construct
  REGION 1..620: note = TnsF-Tn7 System Protein
MTPRPCFTCSTCGNHRPAHKWTPSGPVCSRCYHRDHQARRRCGQCGEQRRIVRRATTDHPDQCSRCRPKPEPNVQCETCDRWVHATRKQLAVEHFHCAMCMWKASRKPKELPQPKKPPIRPRRPPEVDCSLCNRRITTILAAWPVGPVCASCYTRVRENPAQCARCSQRHVLIGIDDATGERICGPCAGSRYDYRCRRCGEPGRVYSAGRCFRCCLEDRLREMLGNERGDISTEFQPVFDALLGAEKPRSVLVWIGKSAAAQLLSELAKSEQPVTHGLLDRMPPTRAVHRVRDMLVQTHVLPERMEYLDRVLPWLEHTLAGRPDGHARLIRPYAQWHLLHRARRRAQRREVDITGTAAFQLRHALRAVLELLDALDEQELTLESMRQHHLDRWLAAGSSSRYLARGFIAWAVHRGMAADVMIPAPRVGQPSMFAETDDYLDQLRRCLTDSAIPLDLRAGGALVLLFGMRIRDVLRLHTDQLCHRGRDHYLRLGDHELLVPSTLGQLLEQLPQPASPRSVLSVPVETVLMFPGHNPRTSIWPGLFGARLKQHGITPRASRNTALITLAGELPAAVLADLLGLHSATGVRWAKRARRDWTAYLAERREDASASSSTADRQLP

SEQ ID NO: 5068 - protein, 620 aa, synthetic construct; identical to SEQ ID NO: 5067
  REGION 1..620: note = TnsF-Tn7 System Protein

SEQ ID NO: 5069 - protein, 111 aa, synthetic construct
  REGION 1..111: note = TnsF-Tn7 System Protein
MIKKMGYEWRLRRMMADREMYQTTDLVPLLAERGIGLSREQVFRLVTQPPQRLSMDVLAALCDILGCSPNDLIEIKVENASMPKKAAAGGAGRSAPVARRTTIRRPPGASG

SEQ ID NO: 5070 - protein, 493 aa, synthetic construct
  REGION 1..493: note = TnsF-Tn7 System Protein
MTDTTTGRRPRGRPRTTGARNCDRCGRSTGKIRIRWPDGDIWGICFHDATRTHGSCHQCGQHRLLPGRDGDRQLCRPCAGITTDLDCHRCGREGEHHRRGLCTRCTLRDDLNALLLPADGPATTEAARIVDVLATMDRPESIHTWKRNPKVDQRLRGLGDGTIPLTHDGFDEAPASIAREHIRELLVHHGLLPRRDPDLARFERWLQERLDSIDDPSVRRPVEQFARWHHLRRIRRRVGQELRGAVHTSKQEITEVSRFLTWLAERDKTISTCGQGDVDEWLASGPTTRHAIRTFIVWSGEQKLSSKLAIGFRQPRSGRLITQDDRLDLLGRCLTGEPDTLPYRVAAVLLLLYAQPLVRVAAMRTEQIQVAPNEILVLLGKEPAAVPEPFAQLLREHLGARPNLRTANTEGSPWLFPGYRAGRHLHVQSIMDRLRAIGIDLLGARNAALRDLVRQVPAPIVATQLGYSHQVTQRHAELAAEPMSRYTAVKSRR

SEQ ID NO: 5071 - protein, 493 aa, synthetic construct; identical to SEQ ID NO: 5070
  REGION 1..493: note = TnsF-Tn7 System Protein

SEQ ID NO: 5072 - protein, 247 aa, synthetic construct
  REGION 1..247: note = TnsF-Tn7 System Protein
MSDSPPPASGPSIPDSPASSALASVPAAGTRRASPMPAHLKFFYGPMDCGKSTLALQIDHNHSRQGRSGMLLTRYDRSAGARITTRVGLSHSAIEIDDDTDLRVLVRQRWASGQALDYLIIDEAGFLNPEHVDQLAELVDDWHVDVYCFGLATDFRSLLLPGAKRLIELADELHPVHVEVLCWCGRPGQQNARIVNGRVVREGDTVAVGDTSVDGAAMRYEVLCRAHYRGGQLSRSTVTEQQLSFDV

SEQ ID NO: 5073 - protein, 247 aa, synthetic construct; identical to SEQ ID NO: 5072
  REGION 1..247: note = TnsF-Tn7 System Protein

SEQ ID NO: 5074 - protein, 367 aa, synthetic construct
  REGION 1..367: note = TnsF-Tn7 System Protein
MAVDDLGRVITLGGVRYLNPADQVLEEMLTGWRRQQLSRNLSLDTINNRERVVRRFLDFTNEMPWHWTHAHVDEYFGDMRSEKQRRQNTVRGYQSAVQLFCAYLVDPVYGWGDRCQDLFGTHPVQVCFEWNTATHSQENEHDPGKRAFSHDELQAFFDHADAEVARVRELGRKGWLPALRDATLFKTAYAFGLRRNEVRHLRTIDFERNPHAREFGRYGAVEIRYGKAHKGSAPKRRTVLTVFDWSADVLAHWSEHGLPRFAGEGLDLFPNERGGLVSEGALGGRFRRYREQLGLDGALDMHSFRRSYATHLIEAGFDALFVQKQLGHEHASTTAIYEFVADNYRRTMLRDALDGTIRDALTRPRSS

SEQ ID NO: 5075 - protein, 110 aa, synthetic construct
  REGION 1..110: note = TnsF-Tn7 System Protein
MKRDVNYEWRLAEMMARHGMHNSTDLAPLLRERGIDLSPSQIYRIVTQRPERVSMMLIAALTDIFQCGPQDLMTFTAADAKKPRKAAVAGNVVNLTDAIKPVRARITRDD

SEQ ID NO: 5076 - protein, 380 aa, synthetic construct
  REGION 1..380: note = TnsF-Tn7 System Protein
MRGHWRKNLKRDIAFFQDLESTFEGPEQLSGVLIVRKLGNDFVKRYRRGMSFLAHENLIIMDDDPDYPVERAIDRLRVLTRDETVWIQQCLERFLIELLNARARIANRGRHSRIPVSAKSLESAVRSAHRFLAYARDEHDATSIRDVSQEILDQFVGARKYDRTAISAFLRYVRKYEKTFQSIKLRKIQTPSIPAHLVMSEQERLRFMRIFSEVTEPKQIHWALACAFNLLYAQSVSKIVKIHLDQVRQGDDGYEVKFAKVWLAIDPAIQPLMARWMNSRREFGAFDATGSSPYLFPGMRTGTHLTPSSLANFRKKHHYDTRAGRVTAISALIRHGLKQIKVLTDCFGISAIRAHAYLRHFGAHNHDMARHVYEHHAKSK

SEQ ID NO: 5077 - protein, 398 aa, synthetic construct
  REGION 1..398: note = TnsF-Tn7 System Protein
MTAVILPFPHGMGGLPGALPDPELPSPAKRPPAVPQTPLPLERPPRELTEEERRLQTRILDGFFRGCRLAQNHAPKSVARDRAYAEEFLAFVGQPMWSCTPDDFASWAGHIGLKKGLAPRSQRTMQTAIATFWDYAVSNRAWQNEALALAGERIEEIVTRDNRMVHTCDNTPVLQRTYLAADEFNRFFEILDLVIEIAAIERPRLLKSLQRDRAMIYTYYAFGLRLGEGWGLNVNSFSQNPDLPELSSFGCAGVWGKGTRGSGPKFRTVPTVLADISPMLTWYLTEVRPKFKDNTGKERAMWLSERGGRLSRASIALRYKRVLDACGMEAHLFSPHGLRHMYVSHQQTAGVPLQFTSKTVGHSSGAVTERYTHLPDQFLRNIAMNLVRGAADPENDDE

SEQ ID NO: 5078 - protein, 147 aa, synthetic construct
  REGION 1..147: note = TnsF-Tn7 System Protein
MNETSVFGQIHWCLPELMAERNQMSQAEMARALEADGAHVISRTQVGRMATRSPTNVSLALIGSLCRILECSPNELFGWQSPPTARDLNPVMTGIAEQGRLALGPNPVPPLPEIPSESPRLDAQTRARVVGPPARALPAHAISSKPK

SEQ ID NO: 5079 - protein, 193 aa, synthetic construct
  REGION 1..193: note = TnsF-Tn7 System Protein
MPSRNELWWVYALRCTGDRYYIGASSNVGKRQHAHFAGHGSVFTRAHPPIALVGAIPVGSRSQAMTLERKVKRWPPERKQLFFSVFAQTWQRHGIASIEGDAVMTNLEVALEVLVELSERRISYESFAFDECVRVCPELVDLFSELGVESTAAATWLCTPNSYLAEARPAALIAKGETASVIGLIARSIHKTG

SEQ ID NO: 5080 - protein, 380 aa, synthetic construct; identical to SEQ ID NO: 5076
  REGION 1..380: note = TnsF-Tn7 System Protein

SEQ ID NO: 5081 - protein, 306 aa, synthetic construct
  REGION 1..306: note = TnsF-Tn7 System Protein
MGLARVISRARVGVRAPQVTVEVHVGGGLPSLSIVGLPEAAVREAKDRVRAAIVCAQLEFPAGRITINLAPADLRKEGGGFDLPIALGILAASGQLPQHALEGCEFLGELGLTGELRAVHGVLPAALAAAESGHRLILPAPNGAEAALVGHAQVCIARTLLEVCAALRGQKTLPAAQAAPDNAAPSHLDLADVRGQAQARRALEIAACGQHHLLLVGSPGCGKTLLASRLPGILPPMTEAEALESAAVNSVSGHFFDPAQWRQRAFRSPHHTASAVALAGGGSSPRPGEISLSHHGVLFLDELPSF

SEQ ID NO: 5082 - protein, 306 aa, synthetic construct; identical to SEQ ID NO: 5081
  REGION 1..306: note = TnsF-Tn7 System Protein

SEQ ID NO: 5083 - protein, 472 aa, synthetic construct; identical to SEQ ID NO: 4032
  REGION 1..472: note = TnsF-Tn7 System Protein

SEQ ID NO: 5084 - protein, 472 aa, synthetic construct; identical to SEQ ID NO: 4032
  REGION 1..472: note = TnsF-Tn7 System Protein

SEQ ID NO: 5085 - protein, 363 aa, synthetic construct; identical to SEQ ID NO: 4033
  REGION 1..363: note = TnsF-Tn7 System Protein

SEQ ID NO: 5086 - protein, 363 aa, synthetic construct; identical to SEQ ID NO: 4033
  REGION 1..363: note = TnsF-Tn7 System Protein

SEQ ID NO: 5087 - protein, 110 aa, synthetic construct; identical to SEQ ID NO: 4035
  REGION 1..110: note = TnsF-Tn7 System Protein

SEQ ID NO: 5088 - protein, 110 aa, synthetic construct; identical to SEQ ID NO: 4035
  REGION 1..110: note = TnsF-Tn7 System Protein

SEQ ID NO: 5089 - protein, 505 aa, synthetic construct
  REGION 1..505: note = TnsF-Tn7 System Protein
MTDPLAGLRPRNTTRGRPRVIGSRLCARCGRKAPKTRATWPEGRICAVCFYEATHCHGICAGCGAERLTPGLREDGARLCGPCAGIATDFTCAGCGNEAEVNRARLCARCLLRGELDHLIVRNAADPDAMTRLVDILCAAGRPESIRTWKRSTKVQDLLTALSSGAVPLTHEGLDAYRPGLHVNHLRALLEHNGLLPDREPYLAHFELWIAAKLAPLPTSIARPVEQFATWHHLRRIRGMTVTDRTLRGPVHHSKQEITETIKFLTWLERTHGRTVAQCRQGDIDAYLQPGPTTRYFIRTFFVFARAHRLCGALTVPHRVARVRPALTQEQRVAWIGEMLAGTSESLPYRTAGVLLLLLAQPLVKVVALRVDAVHDKPDGMTLRLGEPATPLPEPFAGLLRAHLLTRPNQATGNANSPWLFPSTRAGRHLHANTAMMRLRNLGINLQGARNRALDGLVTEAPPPVVADALGYSHVIAFQHQEAAGGTWARYTGLARARPSAPPSR

SEQ ID NO: 5090 - protein, 505 aa, synthetic construct; identical to SEQ ID NO: 5089
  REGION 1..505: note = TnsF-Tn7 System Protein

SEQ ID NO: 5091 - protein, 352 aa, synthetic construct
  REGION 1..352: note = TnsF-Tn7 System Protein
MAGLHTLHPADQTVEDMLLGWRNQQLSRNLQFATIEQRLRYVRRFMEYVNEFPWRWTPVLVEEYFGDLRSVRHLSHSTMRSHQAALRQFTSYIANPDYGWDLECERLFGEHPAQVFFDWNTAQHVQEYEGRPSKRPFTRSELQQLFDYADSEVERVAQAGVRGWQAAFRDATMLKVAYSYGLRCNELRHLQLVDFARNPHAAEFGKYGVCKVRFGKSRRASPPKPRAVLTVFDWTPEIIQDWLANGRGTPDTLDVFPNERGALVTESTLLRRLRRYCEILGFPDGLDLHSLRRSYATHLLEDGWDPLFVQAQMGHEHASTTGIYTFVSSAFRTSTLRSALDRTVREALEGRT

SEQ ID NO: 5092 - protein, 111 aa, synthetic construct
  REGION 1..111: note = TnsF-Tn7 System Protein
MKRDVDYTWRLAELMAARGLNTTTELVPLLAERGIELSRVQVYRLVNQRAERVSLQLLAALCDIFQCEVGDLITVTAADASARRKTATAGENVVTLDRSVRPRRARVIDDD

SEQ ID NO: 5093 - protein, 482 aa, synthetic construct
  REGION 1..482: note = TnsF-Tn7 System Protein
MAKIRVRWPEGNICGICFTDATHTYGTCRGCGEEDRMLPGRDEMAWAICRTCAGIETNLECDACGREAERFRGGVCIRCVVRTDLNDLVSPGADLRLRRLVDLLADVARPESIYSYMRGKRAHALLAAIGTRELPLTQEAFDGLEPGHAVEHLRALLVHHHMLPERGTDERLHRFEQWIKARLATLPDDGTRDRIERFATWHHLRRVRDRAVEERANLETVTHAAKQEITEAGKFLLWLRAEHHIGTEDLRQHHVDEYLASGTSTRKHIRNFARWINRDEGRHRKADRIDAPFRTARSEPMLRQSERIELVRNCLEWHQVTLSTRIAGLILLLWAQPLNKIVMLRREHAVFGVDGMTLQLGVRPTAVPEAVVDLFCGHLDSPGNPQTVNTGTPWLFPGTRAGHHLHPGTLTERLKVLGIDAQRARNATLRDLAHDVDARTLIDLLGYSKPVIARYAAHAGAPMSDYVDLKTPTPRGAATRLS

SEQ ID NO: 5094 - protein, 783 aa, synthetic construct
  REGION 1..783: note = TnsF-Tn7 System Protein
MHAADAHDVIRVRGAREHNLKNIDLDIPKRRLTAFTGVSGSGKSSLVFGTIAAESQRMINETYSAFVQGFMPALARPDVDVLEGLTTAIVVDQERLGSNPRSTVGTVTDANAMLRILFSKLGEPYIGGPTAFSFNIPTQKASGIMTSAKGEKKIVRNEVYLGGMCPRCEGRGQVSDIDLSQVIDESRSLQEGAILVPGYTADGWMVRGFAESGFYPADTPISTFTEKQRHAFLYSEPTKVKIQNINVTYEGLIPKITKSILSKDLDALQPHIRRFVERVATFAVCPECGGTRLTAGARSSKIDGISIADACAMQVTDLAQWLRELHRAEAGPLLAGLSANLDAFVTLGLGYLSLDRPSGTLSGGEAQRIKMLRHLGSSLTDVTYVFDEPTIGLHPHDIQRMNELLLRLRDKGNTVLVVEHKPEMIAIADRVVDLGPGAGTAGGEICFEGTDDDLRVSDTLTGRHLDDRARVKDTVRAASGALQVRGATSHNLQDVDVDIPLGVLAVVTGVAGSGKSSLIQGSVVGRDGVVAVDQGAIKGSRRSNPATYTGMLEPIRKAFAKANGVKPALFSANSEGACPTCKGSGVIITQLGFMDTVETPCEDCGGKRFQPAVLEYTLAGKDITEVLGMPVVEARAFFAGGEATIPAVAKILDRLADVGLGYLTLGQPLSTLSGGERQRIKLATQMADGGAIYVLDEPTSGLHLADVENLLGLLDRLVDSGKSVIVIEHHQAVMAHADWIIDLGPGAGHDGGRIVFEGTPADLVADRSTLTGEHLAAYVAVGA

SEQ ID NO: 5095 - protein, 783 aa, synthetic construct; identical to SEQ ID NO: 5094
  REGION 1..783: note = TnsF-Tn7 System Protein

SEQ ID NO: 5096 - protein, 370 aa, synthetic construct
  REGION 1..370: note = TnsF-Tn7 System Protein
MTDDDNVLFAPFGARTPDPEAFITAVLTGWEKQQRSKDFSPATIRTRRKLVMAFIDFTGHYPWQWTMGDSDEFFSHARAVRNLSHATVRSYQSAIKLFCDYVCDPRYDWNDQAAKMFGQVFVQVVTELNRVTHSQTNTARPEKRAFTQRELQELFDLADLEVHRILDSGRRGALAAWRDSVAFKTAYGWGLRTNEMRHLQTVDFSRNGRAPYMGDFGVARVRWGKPHRGSAKKVRSVLTVWQWAADVIEDWIEFGLPRYGEPVNDLFPTSTGGLVGESHLLDKLRGLVDELGFPPGLDLHSFRRTYATQLITGEGFDVTFVQLQLGHEHAATTSIYTLPSPDYQRRALERAHSNTLDAARAPRPDNRRTP

SEQ ID NO: 5097 - protein, 184 aa, synthetic construct
  REGION 1..184: note = TnsF-Tn7 System Protein
MTSVGSESTHLVILRGDSASGKTTTALALRAKLGPKVALIHQDYFRREILSNDDRPQRSRDASILIVSAARDALNLGYDVILDGIFNLRDYSALFERLHNDHRGQTRIYQFDIGLDETIRRHAGRPLSKEFGADKIRDWYDGWQPLPWHDETRIGSDISTEDLVSSILQDLCLEQPPRLATKSE

SEQ ID NO: 5098 - protein, 184 aa, synthetic construct; identical to SEQ ID NO: 5097
  REGION 1..184: note = TnsF-Tn7 System Protein

SEQ ID NO: 5099 - protein, 114 aa, synthetic construct
  REGION 1..114: note = TnsF-Tn7 System Protein
MSRRELTYTWRVREIMARRRIFTAKELAPLLHERGITLTPNGIWRIVSGEPERISLKMLVALCDALDVEMNDLITFTATDVKTVRHRKASGDSGVADLRDYRPVRARIIDEDDD

SEQ ID NO: 5100 - protein, 202 aa, synthetic construct
  REGION 1..202: note = TnsF-Tn7 System Protein
MPWLGTEGLPGHVLDEDTRWQLLRRCLTDPSLDLRMRVAGALVLLFGQNLIRIAALRAEDITTASDDTYLTLRDHPVLLPPVLATLVTNLAAQPAPIDDPRPPDTPTWLFPGRNAAHLDPSRLARLLNHDLDLDARAARGGALLALAADLPASVLADLLGLSIAAALRWSALAARDQGVYLAARLEDDNADVGGDTYPHPTR

SEQ ID NO: 5101 - protein, 324 aa, synthetic construct
  REGION 1..324: note = TnsF-Tn7 System Protein
MSHANAPLTPTGRLRLARCVVEDGWTRLRAAERFNVSVGTVRKWVNRYREYGKAGMVDRSSRPHHSPTQTPRRRERRVLGLRVSRRWGPARIAYHLGMQPSTVHKILSRYGCVRLAFTDPATGAPVRAHTRRPHRYEHEAPGDLVHVDIKKLGRIPDGGGHKILGRAKGKRDRKRGMGYWYIHNAVDDHSRLAYSELLEDERKETAAGFWHRAHAFFTDAGITVRRVLTDNGSCYRSHTFADALGPEIKHKRTRPYRPQTNGKVERYNRTMLEEWAYAAAYVSESDRAARLPAFLHHYNFHRGHTALRGASPADRVHNLRGQYT

SEQ ID NO: 5102 - protein, 266 aa, synthetic construct
  REGION 1..266: note = TnsF-Tn7 System Protein
MTILALRGARFGYRRLDAADDHPHTVFDGADLTISAGAKVALLGGNGSGKTTLMRLLVGLNRLEAGDLELDGEQVRDRRADRTRLRQSVQMVLQEPDDQIFATTVRADVSFGPVNLGLDRDEVAHRVDQTLAALGITDLADRVPHHLSFGQRKKVALAGALAMRPRVLLLDEPTAGLDPISCSELLAALEGLCSAGTAIVMATHDVDLAWAWADEAVVLSNGTLTRGPAHRLLHDEKLLAAARLTTPWGAAVSRHLARTVRQPGDV

SEQ ID NO: 5103 - protein, 266 aa, synthetic construct; identical to SEQ ID NO: 5102
  REGION 1..266: note = TnsF-Tn7 System Protein

SEQ ID NO: 5104 - protein, 430 aa, synthetic construct
  REGION 1..430: note = TnsF-Tn7 System Protein
MGIIGTRRYCDWCWRNLPETRRECNRCTRLDHLGRGALCRSCRAQDRITQTFNDDVLRRQPALGALRDHLLNADPGYFLRLVHSGRAWRRLCEIAAHPVPITHDDLDRFGTRAAMSQVRSLLVDLGVLPYRDERLVELERWTQGEIQKLTGRANELAITQFTRWRQQRRRRDTPMTATILANDKREVRLVVALLCAIERAHHDIRTVPQAILDRWLASQSRDATRVRHFIRWCVSAGINPSLVVPGYARPDFLLGGTHGASNEAALTAAATDQILDPRHRLAIILAVVYGIRVHRIAALPISALQLGDDDASIRLGTIDLRLPDIARPWVEAIRSGITVKRRLGGRDTDPVWIFPGYRHGDHTLPSSLAAQLRQLGVDPTVGHRAAAGAVVTQVPSAVVARVLGVSIATASTWARLAGIQPGGPVSREFG

SEQ ID NO: 5105 - protein, 370 aa, synthetic construct
  REGION 1..370: note = TnsF-Tn7 System Protein
MREPYGSAELHLLSGVLLLNEAAAVFDAMLDGWCSQMVGGRSLRMPTVTNRIQVVRQFQRHAGEWPWTWSAAMLDEWMTDLVATHRLAASTMRRYQDTIRQFCDFVCSPHYGWVAECETRFGTHPVQVCHEWNARAHVQGSEANPARRPLTRDELQAVFDRADEEVDRRLDAGRKGAIAAYRDATMLKVAYGWGLRANEAVMLEVHDFYRNPKVPIFDDFGFLRVRFGKASRGSPPKPRAVATVMPWAVDAVRDYLDNVLPMMRGATSTCSLWLSERGERVGKRALGDRFAQYRDELGLDRSLTPHCLRHSYATHLIEDGHDPTFVQRQLGHAYQSTTGIYTHVSAEFANRILQDALDRVPQFDTMKGTP

SEQ ID NO: 5106 - protein, 113 aa, synthetic construct
  REGION 1..113: note = TnsF-Tn7 System Protein
MTHQLNYEWRLREQMAAAGMFSTTKLIPLLAERGITLSASQVYRLVAERPERLNLQVLVALTDILRCTTDDLITRVETAEGQIEEAVGDDGRSFANDALRRSGHRPARARLID

SEQ ID NO: 5107 - protein, 634 aa, synthetic construct
  REGION 1..634: note = TnsF-Tn7 System Protein
MCERCGQRPQGYHARRWCYDCKPGTKGRPRPCRRCGSVGDYWSGGLCRRCHQYAPQPPDSCRDCLAWGVRRTRNWLCGGCQSWRVLHPVEGPCISCGQRLSINDRLACRLCWQQTRDQSQRNEPIDVPLANRHGQQLMFANMSSSKNGFRPHPRRDFRRPGPEAPRREPRPAPLPDQLDLFAFRPIEDPARRYGFGEPPSLALATLLDRHAREHAEGHGWSEGQTTRARIGLRVLQALRRIDAAPIKASDVLHLVPLGLSVRAVLAILDTNGLLEDDRTPTVQVWFERQILDLPEPMTGELQIWFEVLHCGSSTPPRSRPRSIVTIQTRTRWALPALHAWADAGHRSLREIARADVLALLPASGTARATLGGALRSIFTILKRRKVLFVNPTARISVGNVERRTPLPLDTTRLREAFNSPDPVRAALTALVGIHGLRAREICALQLTDVRDGRVHLPDRTIPLAQPAKVRLDAYLADRVLRWPNSVNPHFFIHCLSATATGPVRRPWVTDRLGMSAQALRQDRIVDEAHATGGDLRRICDFFGVTMATAAHYAATLDHPDLAGANADTATGSRTQGPTREHQRPSPVRFPTTGPSVFLNPSLLTRKRGDSAGWVSRRIQSRQPTIIAAIAASTS

SEQ ID NO: 5108 - protein, 376 aa, synthetic construct
  REGION 1..376: note = TnsF-Tn7 System Protein
MSLAVVRSVGTARSLRSPHEEQDFEQELIDQYSLAMAAAGITDDTAANERGVVFEFTQFLGRPLWAAEVDDADRYLRWLRRERGNAKSTVAGKAGVLARFFDFVITRYSGDIHALFDRVVVQPIDEFNRPANVMTSGSTRIPPRADEVAALFEAWSEALPEARKYLPAARDYLAASLWRRIGLRINETVMLDIRDWHPELGEHGKLHVRHGKGSRGRGPKIRIVPAIDEVDALLEWWLTDVRHQFGDDFNDPSAPLLPSERRDSMTGHCTRIGPEALRAGLGDAVEVWLPDWVGRLSPHGLRHFCASHLYERGMNLKAIQEVMGHSWLSTTTQYIHVHDGHIEQSWAAANSRVLSRFGATTDSANRDAVTDTVREG

SEQ ID NO: 5109 - protein, 105 aa, synthetic construct
  REGION 1..105: note = TnsF-Tn7 System Protein
MRWNMRMKAAEAGIWKSTELRRRLADAGLEISAGKMSGLWAGTPTTIRLDDLDVICSVLGCTPSDLLLCEPEVVAARKPKKPTAAARSQARAQPIPGRRRTKPPA

SEQ ID NO: 5110 - protein, 477 aa, synthetic construct
  REGION 1..477: note = TnsF-Tn7 System Protein
MAAEQMNDAGAAVPAEPNGHGSLDAAPATLDWTLVRRLHDATATALAEELKRRPALPVAAQQELARTLIQDEIDQLVRERMRTGQAVPSAEDELAIAEAAFAAQFGLGRLQPYVDDPLVENIEAHGFDNVWVGYADGRDVPVEAVADSDEDLVRQLQYIAARLGRSERTLTPASPLLTMRLPDGSRLAAVIETVPRPQLVIRRHRIRNVDLSDLIGLGALDRALAEFLRAAIRARKNIVVTGGQGAGKTLLLRALANELPVQENVATIEKHFELLLHDLPERHPRVVPFEAREGTGERGPDGRRLGEVTLTELVEQALVMNASRVWLGEVRGEEAWPLIEVMEAGEGGSCCTLHARSAHLAFERLANLCMRGRASVTPEHAYRSCAGAIDLIVHIATVDERWIGGRRHRFVSQVLECNGVGEAGRPAVTEVFAPGPDRRAVPEHDPVDLADYERVGFDPEWLRSGRGHWAHPLETLR

SEQ ID NO: 5111 - protein, 477 aa, synthetic construct; identical to SEQ ID NO: 5110
  REGION 1..477: note = TnsF-Tn7 System Protein

SEQ ID NO: 5112 - protein, 260 aa, synthetic construct
  REGION 1..260: note = TnsF-Tn7 System Protein
MCARCALCDDLQGLFGGEPSDPSLVGLIDALCASDRPESIFVWKRAPPRFRTSFADSANEGSPSHTRDSTAFPASRPSICGLCCSITAFSPSVSRICPDSSNAKLDGLPEKCGSPFSTSPPGTTSGESAPRQQQTRARVVRSTQPARRSAQDHRLAWIHELVTGTSESLPYCVAGMLLLLHAQPLVKLVTFSTNVFDDGDSGMSISLGRHPTDVPEPFASLVREHLVAEGLGYSAKVAFLHGDKGAEPWARYAGRRIADP

SEQ ID NO: 5113 - protein, 670 aa, synthetic construct; identical to SEQ ID NO: 464
  REGION 1..670: note = TnsF-Tn7 System Protein

SEQ ID NO: 5114 - protein, 700 aa, synthetic construct
  REGION 1..700: note = TnsF-Tn7 System Protein
MPGRARAAPASWPQLPGLPTRPSGGPGGGRRHHHARSSLAAAVDAVAAGGQALGHLERALAAGPLALQLGAPPIAGRLTIELIACGSTVLTVPRCARCGRTGKPLTRGEGGGVCQRCRAWQQASACSSCGRLKPVAARDGAGGPLCELCRRHCGRADRTCGRCGKTAPIAVRARDGAPDICVNCYRMPDAVCSVCGKRRECNFADTDRPICPSCSPKSTAVCARCGAQRPPAARWPEGPVCDPCYTAALQHRGPCARCGARRRLVAPRGLHADTCADCAGLPVTHTCTDCGIEDKLYERSRCARCSLRRRTTALLTGADGQIPTRLAPLLEAICAARNPRSALNWLARSHGAALLADLAAGTLPATHQALDAHPRRRAADFLRHMLTAAGALAPRDEELTRTGQWLDDILHTVEPDTARRQLRGYATWQVMRRLRVSAARAARPRSYTGHARRNIRAAAEFLAWLHARDRALTQCTQADADAWLATGPAAGQVRDFLTWATHHGHCSALTISGPTPNTGTATSPDQRWTLTARLLHDETLDPTDRAAGCLLLLYGQQLSRIATTTTNQVTTRDSTVHVRLGEHDIPVPEPLGKVLTELARNGRAYTGTGSPTQTDWLFPGGLPGKPITASRLGERLRALGISAQAGRRAALIDLAAQLPAAVLADLLGLAPTTAVKWMRQAGGDWSGYAAELAKARNHQT

SEQ ID NO: 5115 - protein, 700 aa, synthetic construct; identical to SEQ ID NO: 5114
  REGION 1..700: note = TnsF-Tn7 System Protein

SEQ ID NO: 5116 - protein, 370 aa, synthetic construct
  REGION 1..370: note = TnsF-Tn7 System Protein
MGDRLMHLVWEGLVVGGRGGLVLVAADGDVSVSPGRELFEAMLAGWRRQQQARRLSGPLIDGRERIVRRFVAFTGCWPWQWSSAQAESWLASGGWVHSTIRAYQGALGLFLDYVCDPRYGWVAECEQRAGAVPAQVIGEHNSTTHAAAYEGRPERRPLTRTELQAFFDAADDLVERASCSRRKGQLAAFRDATLFKVIYAWGLRRREAAMLDVNDFAVNPAVPELGSRGVCHVRYGKAMKGSPPRRRAVATVMPWAAEALEQYVCEVRPRYGAGEHPALWLTERGARISVRQVDDRFGQLRNLAGLPADLSVHCLRHSYISHLIEDGADPLFVQWQAGHSWASTTAVYTTVGQDARNRMLRRALARAYQS

SEQ ID NO: 5117 - protein, 340 aa, synthetic construct
  REGION 1..340: note = TnsF-Tn7 System Protein
MSLEEHKRRERAQAIGLFRYQLICPALDAGLSTKQRGKLVRQIAAGTHTDPFGNQVRVSRETLDRWIRRYRGGGFEALLPEPRRLAARTDAQVLELAASLKRENPTRTATQVARILRTATGWAPSESTLLRLFHRLELMGRGAGEAPAVFGRFEAANPNELWVGHALHGPRVGDRKTYLFTFLDDHSRLAVGYRFGFSEDTVRLAAALRPALAARGVPAGIYVDNGSAFVDAWLLRACAKLGVRLVHSQPGRPQGRARSNGFSAPCANSSWLRSPTPPARTSLLPGGSRHRALGAQPAVCGLDRNRIPPPYPYRDRAASAGPLGRRLRPAGAYPGHAERR

SEQ ID NO: 5118 - protein, 290 aa, synthetic construct
  REGION 1..290: note = TnsF-Tn7 System Protein
MTRRIDGYAVYFSRIDRRFCSATELTQETMFDLFGAEGLRKGFNIVTFLCERLAIAWNARVLVDLNERRRLDDLIRQCSDMPWHSELKRYASSLNQSERKLQSKTVRYYVSAAIGLVQLAGVRSFRDIRQAHLDRLLRTRGGLAASLSAFARHLRESYGVALKNKKPPTASVRAKERTLIRRIRVTYKRLEETNNAREARAMLARLLADLYQIPLQEVLALTGRNVRRQEGHIVLWPSTRQVHIDHHKLARHFDRWLPSTAPDVMVFEGRNRVQPLSTDAVRYHTERLHH

SEQ ID NO: 5119 - protein, 609 aa, synthetic construct
  REGION 1..609: note = TnsF-Tn7 System Protein
MPEPVDRIEEFPKDGRLWWITWVDGYSVPHGGTATPSVEVELTRLEANLEDLFRLDSRRTVKVELGATPPEHLIVRVLSGYVPRLVLGMVFKDGVEVGSLPMEEFEFSTAYGEVDLRQIRERMEDPPRWWNSAHTYKVMNPTSYRLERRFDQSRAVIITDGSGIAVVPCHEIFRSMYATHTDIALALTSGPWRDTMDFVVSSQRTGVRTDGLWQVCLRRRIADLHAPLLANLVLGEDGRKAANGIYASLLASRNGAGSIAARIPFDTSEVRLKVKGVLLHDNPVKLLVFQVSEIDWVGPCDIVVMRDNDASKGKSLTETDRQKPYSSRDRHVAERLDGTMAAASNEDPSAHAAVTNISVPLPVWRIPPQLKKEEKEESFLYASGRPGGDDELLEQLSAGNEWYGESRSGRVDYSFRRRDHTTRFTEIAQMLDRLATAGRIDRWEVVQEESERFFFGSLPVWPFPTRINGSKLGLRYSYIEKATRQVRTALVCRVAIGGRIVYWMEIEIERRSNGKPSWVFALGEYPESSTIRSVLQLAAKTGGSWPSEDMLIQTVGVTAAEPWKHTHINKRRKGEGGRFNEDRALETMMTVLAKAEPLPTMLANSQIGL

SEQ ID NO: 5120 - protein, 503 aa, synthetic construct
  REGION 1..503: note = TnsF-Tn7 System Protein
MLGRLIETRLPERDRLTVEPSHDHDSTPNPLGVVQLLTAIDLETGHPLRGVPISPRIGQHVFSAHPLVVKQVVESGATPDAKRIQLATFPHATDTAVSLSPSQLLGRHCAILGATGGGKSWTLARLTEEIARLGGKAILFDATGEFRTQTSVAVTHAYLGGRKEGPHDVRRFLSFPYWDLTESDLFVLLRPSPGVQAPKLKEALRSLKIAHLAPALANGGLIRKAGNPRQPFEAACIQQAVALTRPGTFFDIAQLSRQIWEECVYPSGFNAQAANWGGATPNEQSACVTLMSRIESELASPNLECLFSPDGLDPLPGVVEEFLADADQRILRISLEFLSFEHNAREVAANAVGRYLLSLARQGRFLDMPVVVLLDEAHQFLDKSVGDEFTKADLDAFGLIAKEGRKYSLTCVLATQRPRDIPEDVLSQMGMFIVHRLINERDRIVVEKACGDLDASAASFLPTLGQGEAMVVGVSAPMPLPVTVHKPARPPSSRSADFEGLWG

SEQ ID NO: 5121 - protein, 503 aa, synthetic construct; identical to SEQ ID NO: 5120
  REGION 1..503: note = TnsF-Tn7 System Protein

SEQ ID NO: 5122 - protein, 234 aa, synthetic construct
  REGION 1..234: note = TnsF-Tn7 System Protein
MKIDDQRAYVQQITRLDISPARKIGTNRRSMTGQTAVGGFSVAHESSLERDFLILLDFDRNFVEIRGQPVRIGYKDAAGRDRHYTPDVYVEYTNGEKVLYEVKYRENLKSDWIALKPRFKAAIRFARANEMRFALVTEVEIRGSAYLANAKFLRPYRAQMANVAMEEHLLETLDLLGDATPDLLLKAAFSSKENRIRAVGPLWRLVCTKLIGADLTEPLTMATSIWCASREATE

SEQ ID NO: 5123 - protein, 640 aa, synthetic construct
  REGION 1..640: note = TnsF-Tn7 System Protein
MTTAAFVTVKPGAIVGALGKKFKITHILGVDNVLAEDLESRRIERLSVDQLEPASSASTSLTEGIPTPDLEDISDGDWKQAHERFAIISPLLADQDRTRAKVEQAAATAGVHAGTIYEWIKLYTNSLQLSSLIPQKRGRRRGNKGLDESTEKIVRSAIEDAFLSKQRLRPQEVINRVATMCRTAGIDAPHPNTVRNRIRELRPDRVLRARGHSDQARNKFAPIRGNFPGADFPLAVVQIDHTEADIIVVEDETRLPMGRPTVTLAIDVFSRMITGVYVSMEKPSAVAAGMCLANSMSPKNEYLAALEVPGEWPVWGRIAKVHCDNAKEFRGAMLSKACEQYAIDLEMRPVKVPHYGGHIERYMGTSGGEIRTLPGTTFSNTRERKGYDSEKESALTLKEFEQRLVDFIVNVYHKRLHSELEMPPLRKWEIGLLGDSTQPGKGIPEVPSNPHRLRLDFLPFVERTIQPYGVVIDDVFYYHEVLNPWINATEPNQSRIKRKFIIRRDPRDISVVYFYDPEAREYYEIPYRNAAHPPISLWELRAAQKRLRAEGEAHVDEEAIFDAVERMRARVEAAVTKTKAARRQIHRIKTTKRQAKSRATQPAERAAPERTELQVDRTPMSDPMDDDIFGSPIQPFDIKV

SEQ ID NO: 5124 - protein, 386 aa, synthetic construct
  REGION 1..386: note = TnsF-Tn7 System Protein
MRKSRFTDQQIIGFLKQAEAGMPVAELCRQGGFSDATFYKWRAKFGGMDEQEARRLKELEAENSKLKKLLAEAHLDIEALKVAFKVKPLAPQDKRLAIASILSQGVVSERRACSLVGLSRDAWRHPPQPDERTQHLMGRIVEVAHQRRRFGYRRIHDLLRGEFPGTNHKKVYRLYREQNLTVRRRGKKRRCGQRQPLVAPDALNAVWSLDFVSDALACGRRLKCLTVADDFSHECIDIAVDHSMPGPYVTRVLDQAARFRGYPRAVRTDNGPEFTSRAFMGWALARGVEHILIQPGKPVQNAYIESFNGKFRDECLNEHWFESLAQARELIGIWRQDYNEVRPHSSIGRIPPAQFAARHRQSSGDDGQTTTEAQTAIVLNPGPASN

SEQ ID NO: 5125 - protein, 296 aa, synthetic construct
  REGION 1..296: note = TnsF-Tn7 System Protein
MAHFDHLDPSVHSAMLLPTEERIEFAMQDRWIGYTRAHEALDTLEDLLIHPRTHRMPNLLLVGESGNGKSTVVEKFCERHPVIQQPAGDPVLPVAIMNMPSEPVETRFWTELLLALKIAHRDSDPVQRKKNQAHSVLTYVQCRMLVIDEIHNLLYGHARQQRHFLGVLKNLSNDLRLPIVAVGTRDAIRALHTDTQLSSRFEAFGLPRWQLDKDFLRLLASFERILPLVHPSNLIERELAIKLHGMCGGTIGSLARILKRAAIHAIRDRSDKITTKTLEQIGWVKLTEYGKQAEAL

SEQ ID NO: 5126 - protein, 296 aa, synthetic construct; identical to SEQ ID NO: 5125
  REGION 1..296: note = TnsF-Tn7 System Protein

SEQ ID NO: 5127 - protein, 327 aa, synthetic construct
  REGION 1..327: note = TnsF-Tn7 System Protein
MEEHTISHRWLAAMFTSFCTSGSIPLEAKIADERIARAAAACRQIALKVTNRTDLATDHVYAALGADGIRRVAPLISYLMKTGALEWDQARLQNLIEHDRIAAILTTHGRGPHASLLHRYRDHLAIRDRKLVTQRTALTAAITLLAALGNTPIAELSQLHVARTLRARPKDRAALQAFLSFLATEGGPKLTITKPRQDPAALKRQLQADIRKCRKRLHKPRTVPEARALIAILIARVYTLPLSRVLSLKRGEVAVSAKAVTLWPDGEARTLDEPLANAFRDWISLAGSWRSPGHPWVFPGRDGHQPMSEAAVAYHLAGNAKKSPSSH

SEQ ID NO: 5128 - protein, 301 aa, synthetic construct
  REGION 1..301: note = TnsF-Tn7 System Protein
MEKNLTIDMPKGISQIRTLPDPGLQSLWNSIVINPDLKKQLHAQGVSNFTLRKKIPRTVLPLHGIILLVGPPGTGKTSLARGLADCVARTLKNGKFKLLEIDPHVLGSSAMGKTQKAVAELFSQTIAEAAGSGRIIVLLDEVETLATDRTKLSLDANPIDVHRATDAVLTQLDELAEKYPDLLFVATSNFPDAVDAAFSSRCDLIVEVPLPNGEACRQILQDCLTSIGEVFPSIGAITASPVFPNCAAECVGLDGRAIRKTVANAMAATPEIAVNPNTMTAEVLQAALKSAKANRKKGSAR

SEQ ID NO: 5129 - protein, 301 aa, synthetic construct; identical to SEQ ID NO: 5128
  REGION 1..301: note = TnsF-Tn7 System Protein

SEQ ID NO: 5130 - protein, 374 aa, synthetic construct
  REGION 1..374: note = TnsF-Tn7 System Protein
MAVSAGLPAAYAPQQDAALKAIAAWRRDGGSQVFRLFGYAGTGKTTLARRIAEDVDGTVVYGAFTGKAASVMRQKGCYDAATIHSLIYRTKEAEEGGPTFTLNRSGPAAKADLIIIDECSMVDSDLGNDLLSFERPVLVLGDPAQLPPVRGGGFFTEAEPDVMLTEVHRQAKDDPIVRMAMTIREGGRLELGSYGQSRVVSRRTLDPAEVLECDQVLVGLNKTRRLYNARLRELAGHTDPMPAIGEKLVCLRNDRVKGLLNGSTWTVQALRAPPRPDLIRLDVVPEDDPALRRKPTDIKVLRAMITGSDEEIPLFLRRETDEFTYGYALTVHKAQGSQWDRVTLFDESYAFREHRARWLYTGLTRAAQAITVVV

SEQ ID NO: 5131 - protein, 374 aa, synthetic construct; identical to SEQ ID NO: 5130
  REGION 1..374: note = TnsF-Tn7 System Protein

SEQ ID NO: 5132 - protein, 503 aa, synthetic construct
  REGION 1..503: note = TnsF-Tn7 System Protein
MDPEPSGLSPRSAQRGRKRLATGEYTCARCHRQTTRLQATWPEGRICFVCWFDAIHTHGTCPTCGQQRLLPGPPPDPPDSGQPRCAPCAGIDDDFHCQRCGDEAGHYRGTHCARCALRDDLHDLLGGQPSPDGLIALVDVLCRVERPESIIVWKRSKKVEALLRALGDGSIPLSHEGLDTIPGRTTDHLRAVLENRGVLPSRDMHLHRFERWIDTKLDGLPEDVRQPVELFVNWHHLRRIRAKASTGTSTRGPVHSAKQEITETIKFLTWLHDTYQRTAATCTQPDIDEWLSSGPTTRSYIRTFFVVAKNRRINTRVTVPHRSPRTSPSLSQDQRLAWIHELLTGSSEPLPYRVAGILLLLYAQPLVKIAALPSNHINDDANGMSIILGQRPTDVPEPFAQLLRDHLADRPNLRTGGGPDSPWLFPSTLAGQHLHPNTVMSHLRDLGINLRGARNRAIGELVLECPPSLVAEAFGYSSHVAFLHAEKAAEPWARYAGRRLDDR

SEQ ID NO: 5133 - protein, 503 aa, synthetic construct; identical to SEQ ID NO: 5132
  REGION 1..503: note = TnsF-Tn7 System Protein

SEQ ID NO: 5134 - protein, 357 aa, synthetic construct
  REGION 1..357: note = TnsF-Tn7 System Protein
MARTGRPKAELILSDDERSALEEWIRRGSTPQAWALRCRIILACASGATNKEVAAQTGSAAHTVGRWRARFVAHRIAGLGDLPRPGGPRTVTDAQVAEVITTTLESKPADATHWSTRGMAEHSGLSQSTISRIWRTFGLAPHRAETFKLSTDPYFIEKLHDVVGLYLDPPERALVFCVDEKSQIQALNRSQPVLPMMPGIPQRLTHDYVRAGTTTLFAALEVTTGKVIGSLHRRHRASEFRTFLTRLDREVPAELDVHLVLDNYATHKTPAIKTWLVAHPRFHLHFTPTGSSWLNLVERWFAELTTKKIRRGVHTSVPALEADIRDWIAGWNNNPKPFAWTKTADEILERLARYLKQ

SEQ ID NO: 5135 - protein, 421 aa, synthetic construct
  REGION 1..421: note = TnsF-Tn7 System Protein
MGAPRKFDEETRARAVRLYLDRLRDHGESKLAARRHVGELLDINPATIRNWVEAEERDSGSGVGSAAGGDDAAAELRRLRAENAELRRANEILKTASAFFGAGGAGPSTQVRLLFVHEHRSRFGVEPICAVLSEHGVQVAPQTYYRWRSRPVTDRQLDEAYLVNRIVDIYRKNRCVYGVRKMWRAARREGLRVGRDQMSRLMRVAGIQGVRRGVHHTATTTRDQRAARHPDLVKRAWAAPTRPDALWVVDFTYVWTASGFCYVSFVTDVYSRRILGWKASMSKTTDLVSGALAQALSTRQRAISEFTSEGLIHHSDAGSQYTSLAFTEQLAEAGIAGSIGTVGDALDNALMESTIGLYKSELIVPYAHSRNWIGLREVERETAEWVHWYNSVRLHSSIDYMSPIEREMVYATSIAQQGAVA

SEQ ID NO: 5136 - protein, 110 aa, synthetic construct
  REGION 1..110: note = TnsF-Tn7 System Protein
MRRKVDYTWRLAELMAARGLHNTTELIPLLAERDITLSRPQVYRLVNQRPERVSLQLIAAICDIFDCRPDDLLTVTATDARARKTGTTNPANVVDLNRTLRPRRANILDE

SEQ ID NO: 5137 - protein, 628 aa, synthetic construct
  REGION 1..628: note = TnsF-Tn7 System Protein
MSKLPRCSRCGTNPVGYRRRDTCYQCVPKAPGPPTCERCHTNPVAYRGRGTCYDCVPKTLEPRLCQRCGANPIAYYGRTTCFECVPRARNSPLRCKKCGSTSDYYTNGRCRRCHRKAPVIDSCRDCLAWGVTRTRGWLCQACIAWRGRFPTPRQCHCCQRLVPVNRRGHCRLCVRQAALAGPRHSRVDVIAANRNGQQLFLADLFRQKRPEPAATAPPRATRPARYPVAHRQLVLVEIEPDFIAGRRHGFGEPPLPDLVDYLDTVLAEHAAAHGWAKATTSATRSAIRILLATQQTPGAPIATSEVTRLRTIDLASTRTVTTILHLAGMLDDDREPTIDSWLRTQHHDIAAPMAADLRTWYQMLRHGSTTPPRSRPRNHNTITLLVSSAATAMRAWTKTGHQSLREINRQAVLDVLPTEAMQRGKTLIALRSLFRYLKARRIVFTNPTARIRNSPIRPSEVLPIDLEPVREAITSDNPLRAALAALIAFHALRPSQVVAIHLHDIRDGRLHLSDRVIPLAEPVRQRLAAWLDERQRRWPNTVNPHLFLNHYNAIRTTPANPIWITKTIGVSAQAIRMDRILHEAIATAGDVRRLTDLFGVTVPTAERYAFNGIEPTDPTAGSRTQAVK

SEQ ID NO: 5138 - protein, 362 aa, synthetic construct
  REGION 1..362: note = TnsF-Tn7 System Protein
MSLAAVRSLRPTPQLHTAQELEDFEQELVDQYALAGVGAGLTDGYVAQERSTLFSFVRFLSRPVWTATVDDGDRFLAHLRKDRGLSHRTVHSRALTLGRFYEFLLARYQGEIHAKTGHVLDQPIDHFNRPHRAEYSGLTRVPPSDEEIEGLFGRWREALPDARKYLPATRDYLAASLWRRVGLRITESVMLDIRDWRPDLGDHGRLHVRFGKGGMGKGPKTRLVPGINDTDALLRWWLTDVRHQFDDGYGNPDAPLFPSERHDRLSGCCRRAGDDALRSGLAAAVRRWLPSWNGRLTPHVLRHYCASSLYARGMDLKAIQELLGHEWLSTTTRYIHVHDNHVEQAWTTANDRVTTRLNLHAR

SEQ ID NO: 5139 - protein, 106 aa, synthetic construct
  REGION 1..106: note = TnsF-Tn7 System Protein
MRWNLRMKAAEQGIWKSTEMRRRLADAGLEISAGKMSALWTGSPTSIRLDDLDVLCDVLGCAPSELLIREPDKVAARRPQREEPSAAAASGAPIPRLGRNRTKPPV

SEQ ID NO: 5140 - protein, 511 aa, synthetic construct
  REGION 1..511: note = TnsF-Tn7 System Protein
MARPRKPGDPVRWPVPCARCGEHHKISANWPDGGICGYCYQQAKRTRGVCACGHEGVLPGRIHDLPACRRCSGIKLNIDCGQCGAEDELYNGAQCWSCVLAERVDMLLTNPETGCTAPELEVIGTALKSMRRANSGVTWIRQPHVTDFLKTLATEPKISHERLDSLPNSHTREYVRGLLVAHGALPARADLLYIYQDWADKALEKVDSDQHREIIRRYVRWHHQRRMLSMDEVTHGTFLRAKQTVTVAIDFLNWLSSQGIELGHLQQSDLDRWQAEGPVTRSVAIRFLRWAIKSRLVDSTLKMTPHRRGTSSKMPAEQQKKIIDRVNHAGDLSPRIRVAAILVLVFGQQVERVVKLTWDDVTVTEELVTVKLADLPIALPPPLDEPIRQLCDDPGFGLTAAHPNSNWLFRGIKPGQPVTAMALRQRLFDVFSTRAARLGTLHELTKLAPIAILAETLGYSPATIERHAIASSATYAQYIAAIDAAHGESASEGSTQLTDDSNNSDGGWTLF

SEQ ID NO: 5141 - protein, 511 aa, synthetic construct; identical to SEQ ID NO: 5140
  REGION 1..511: note = TnsF-Tn7 System Protein

SEQ ID NO: 5142 - protein, 372 aa, synthetic construct
  REGION 1..372: note = TnsF-Tn7 System Protein
MSVLPGRIPAFLADGDLGLLRADDRVFEAMLDGWRAHLLARGLTTSYIKSSSSIVSRFQQHSNEYPWSWSAHHVEEFLADRRSSGRPVTISTLRANAGAIRAFCTYLTDPRYEWVPFCEKVFQNIPAQVVFEWNSPRHTTDDAAPPRRRSFTKPELQRFFDTVDDDVDAEYAKGSKRWLPALRDSIAFKVCYAYGLRRRELSMLEYVDFGPNPHVPKYGPFGTVQIRWAKGTTGSGPRRRTVLTVPEFDWVVPLLKFWLSGAGREQFPTADRSSLMWPSERAQMTGLRNLDRAFQRARETAGLPPELTMHALRHSYVTHLIEAGYDPLFVQQQVGHSYSSTTALYTSVSADFKQKTIQRMIARRIVTGDEKG

SEQ ID NO: 5143 - protein, 215 aa, synthetic construct
  REGION 1..215: note = TnsF-Tn7 System Protein
MGAICMICGRQRVIMANKQLCLACAVGLTHRCPECKKIVPGSGYGPCYPCSKARARRVRIGEEARTISLPWLAELFRAYCTSDIFPLEAKIADDRIARAAAACRRITLHVTDPPDLAMETVFAALGEGALRRVEPMIAYWATIGALAWDQAQLRTLIELDRIAAILTTHGKGLNGPVLHRYRDHLAIRDRKPISQRIALTAAATLFVRRHGKLTP

SEQ ID NO: 5144 - protein, 412 aa, synthetic construct
  REGION 1..412: note = TnsF-Tn7 System Protein
MKTPDDVSAMVRLKALGWGAKRIATELGCSKNTVKHWLRQGDWRPSKTPSRSKRLDGLTDWLAERFRQHAGNADVVRQDLANEKDIHVSLRTVERAVAPLRRDLVIAARASVRFETRPGEQMQIDFGERRIEIGGVPTRVSLFVATLGYSRRLHVRAFGHERQEDWFAGLESAFQAFGGVPREVLLDNARALVLHHDPISREVILHPRLHAFSRHWGFRVRACAPYRARTKGKDERGVGYVKRNAVAGHRFASFAALEAHLDAWTRDVADRRAHGTTGEAPGARFARDEARALQPLAGVPPFSAARDLVRRVGADCAVSVDGNAYSVPWRLIGERVRVTVSGAVVRVHHGGREVAVHAALKGRHGRVVDDAHLAGLVGSRERPAHRLDPSPIMPPALLRPLAEYEAVAGGGF

SEQ ID NO: 5145 - protein, 260 aa, synthetic construct
  REGION 1..260: note = TnsF-Tn7 System Protein
MDHDHLTLLLDRLKLTAMRDQLDSLIDEAGRGELTIREALTLFCEREVARRDQRRIDMAFGLARFPFVRDLTGFDFGAQPSLDKAQIRELATGRFIANGEAVLFLGPPGVGKTHLAVAIGRAAIVAGYGVLFTPATTLVAQLAKAHAEGRLEERLTHYAKPKLLIIDELGYLPFEPDAAHLFFQLVSRRYERGAMLVTSNRAVGEWGSVFGDAVVATAILDRLLHHSHVVTIRGDSYRLREKRRSGLLQKAAAVPQPTPV

SEQ ID NO: 5146 - protein, 260 aa, synthetic construct; identical to SEQ ID NO: 5145
  REGION 1..260: note = TnsF-Tn7 System Protein

SEQ ID NO: 5147 - protein, 472 aa, synthetic construct
  REGION 1..472: note = TnsF-Tn7 System Protein
MSAKIRVRWPDGAICGICFREAAHTYGVCAGCGDDRLLPGRDEHAKPICRDCAGITTNMTCGRCGVEAERFRNGQCARCVIEADLTELLKPTTPPDLRIKRLIQVFVESTRPESIYTWMRGEKAHELLRKIGDRELDLTPEAFNALPRGHSVEHLREILIHNRLMVAPADRHLAIFEGWVDARLRELQPHPDVASIIEQYARWHHLNRLRERVGVANMDIACRNARQQITEAGKFLIWVEQARERTVATFHQEDIDAYLDGAVTTRFQIKHFIGWFARGRGGSRKLYVPPRKAITLPTLTQAQRIQAIRNAVEFEQVALSTRVAALIHLLWATPLTRIVRLTADQLELRPDGMFIRLGVNVSEIPEPLAPMFWRQLEDRDGMTTNTGTDWLFPGYRAGRHLSVPTLQQRLNTLGIDPQRTRNTTLKQLTALIDVASLSDLLGYSPKTLAQHAERSGSHMARYVDAKQHAHRP

SEQ ID NO: 5148 - protein, 346 aa, synthetic construct; identical to SEQ ID NO: 4028
  REGION 1..346: note = TnsF-Tn7 System Protein

SEQ ID NO: 5149 - protein, 113 aa, synthetic construct; identical to SEQ ID NO: 4029
  REGION 1..113: note = TnsF-Tn7 System Protein

SEQ ID NO: 5150 - protein, 857 aa, synthetic construct
  REGION 1..857: note = TnsF-Tn7 System Protein
MTEVDQPRFVTDPDTVICEVVAAIEPELDPVEISAAVGEVVRLKPRMRALAEALDTDPELLTSGRPEGPKLVGMLIRALLARGATRVVRPQCAGCGKQHKLTSLDEENRRICGWCAIKRREAVCGKCGRKTGVVYRDRDGTPRCQSCPPATDGDPVDQIARHVHQLDPALAEDDLAALIVEAVPLPAQQQRLAWDLDDNPALLTGDGAQGSPRLLALLGALVSHGAEGVTLPACPLCGEQNRLGWRRDGTRCCRRCYEQPRTEQCGRCGITKRIATRSRDGDAICHTCTRQDPLNFQRCTRCGRQATPVVNNSEETLCPRCYQPPMGTCSICGRPKPCYLAATDTPRCGACTSQRREPETCVRCGAVRLVQTRTADGGGVCGSCSQRSDTCAQCGQMKPVHGRSPEGPLCRSCFDVHPVSLRHCSECGTFERLYHHGLCTRCACLRLLRDLLSDSTGALRPAVVPIVDALATSEPYSVLLWLREAPPRRVLTAIAAADGPVTHTLLDGLDHPQAVTRLRATLVAHRVLPDRDEHLAAIEQWLGPFLDRIDDRAERKIVRGFVTWHHLRRLRRGFPQRRSTFEQAVVVKREARVAVRLLDWLHTRGQSLAGCGQGDIDRWLAEGTSYHYSARNFVLWCVRRGHASDITIPIYVKENLRSVFIEADERWTLARRLLHDDALDTVDRVAGLLLLLYAQPLARIATLTLDQLTQRVTDHGVQLRLGTKPLALPPPLDALLLDLVDRRHGRAAVGRTIELTWLLPGGAPGRPISARQLMRRLSRLGIQARLSRNTALIDLAAQLPATVLCDLLNLHTGTATAWNDIAGNTRAGYAAAVSRRQVPLRDPGGRSQSSEPAKPIH

SEQ ID NO: 5151 - protein, 857 aa, synthetic construct; identical to SEQ ID NO: 5150
  REGION 1..857: note = TnsF-Tn7 System Protein

SEQ ID NO: 5152 - protein, 371 aa, synthetic construct
  REGION 1..371: note = TnsF-Tn7 System Protein
MFGSEEPPGSARLELVGGVALLHPEDAVLEAMLSGWAKQQRGGRRLQPKTIRDREAVVRRFVLFAEEYPWRWSAGQVDEFMATLIGEEAKAESTIRSYQVALRQFCDYITSPYYRWATECEQRFGTHPVQVCHEWNTAAHLVDFEANASRRPMTRQEIQLLLDFADERVERAVRLGRKGALTAYRDATVFKVMYGWGLRCTETSKLDTVDFYRNPKAPELGRFGSLHVRYGKRTKGSAPRRRTVASVMPWAVEAVEDYVTNIRPRFESAGHPALWLTERGGRLRPREIESRFASYRDELGLPKELVPHCLRHSYITHLIEDGADPKFVQDQAGHRFASTTAIYTGVSTDFMNTMMRKALDRALGDEGEEMG

SEQ ID NO: 5153 - protein, 114 aa, synthetic construct
  REGION 1..114: note = TnsF-Tn7 System Protein
MTAKLDYRWHLREIMATREMFSTTDLSPLLAERGINLSASQVYRLVVEKPERLSLKTLVALMDILDCAMNDLIEPVAASGAARTRKAAAGSAGNADPGVGSFRPKRARISRDPS

SEQ ID NO: 5154 - protein, 658 aa, synthetic construct
  REGION 1..658: note = TnsF-Tn7 System Protein
MTGRSAPPPEWTELADRITAFLPELPAPEAARIVAGMTPAARTRIRDHLRLHPDALVSGASDAPRSTQALITSLAGAGITGVKAPSCLRCGRVRPLRRAVPGGRVCLGCEGVLAARGNTGPCCVCGETRPRPSNQRCASCQRAHISATRSCSACGKPAALDPCTSCRPRPPARCALCETNAPVCARWPLGPVCKPCYREARTHPGTCPVCQNERVLIAFTDGRRRVCGPCTGRGDPYACPRCASPRSYLIRGLCDRCTLHDELDAVLGPAAETPDDQYARMRAALASCDQPRTALNWIRNSHSARLLAGLTGTGRPLTHDDLETLARSGTRGDAQTTDYLRGILVAYQALPERDELLARIERHLARVVERHPEHALLLRPYVRWSLLPRARRAAHRRAGLKHRIRWAYTRINLAAAFLTAMNERGLALADVTQHEVDAWGAGNPSTHYEVRDFVVWAAHRGHSRPLLVPHRPKADPEGLDEDSHWELLQQCLTDTALPLEVRAAGAVLLLFGQHVTRIAALPADALATVDGHTVLILDRTPIRLPEPLALLLTELTRQEPPGGWAANSPRRWLFPGIRPGLHISSTALARHLTAHHIPVRQARTTALVQLAQDLPPAILAPMLGLHVITAQQWRRRAATDWTAYLEARRRNRRGVPIE

SEQ ID NO: 5155 - protein, 258 aa, synthetic construct
  REGION 1..258: note = TnsF-Tn7 System Protein
MTLSPIARLANVTQGYGNRHIIEKLDLSVYPGVTGILGPNGAGKTTLFRTLATITPPWSGGVELFGRPVNGERQARRARRRIGYLPQDFGFYPAFSIADFVRYCAWLREVPTKDADSMTREALGAVGLADRAQDRMKSLSGGMLRRAGIAAAIVGTPSLLLLDEPTVGLDPAQRLDFRELIRSLALAGTAVVLSTHLVEDVGAACDTVLVLNEGRVLHSSTPLQLAELADLAAPGDNPLERGYMTVLGAHRVNGGSTS

SEQ ID NO: 5156 - protein, 258 aa, synthetic construct; identical to SEQ ID NO: 5155
  REGION 1..258: note = TnsF-Tn7 System Protein

SEQ ID NO: 5157 - protein, 392 aa, synthetic construct
  REGION 1..392: note = TnsF-Tn7 System Protein
MDSKRHDVASSATVGVAVRTIDVPGAIQLVVPGNVRALDPGPAMFGAMLRGWEQQQQSRLLARKTIDDRLSLVRRFALFTATYPWEWTPEDVEAYFSHQLSLDPPLAHSTVRGQQGDLQMFCAFVTDGRYGWAKACEETFGQFPVQVCHGWNTADHVAEFEGRPGRRALTYDELQALFDAADDRVEQTRKRRRKGVLAAWRDAVMLKQVYAYGTRRRETSMLDLSDLRHNPRAKDYGRFGALEVRFGKASRGSPPKRRTVLTVPEADWIVSVLEEWVEEVRPGFSPGGHPALWVTERCGRLGVRRLDEVFTIVREHAALPPELDLHCLRHTYITHLIEFGYPERFVQEQVGHAYASTTALYTWVSDEYRNRLLEESLRRRTERAGGKGLGSR

SEQ ID NO: 5158 - protein, 107 aa, synthetic construct
  REGION 1..107: note = TnsF-Tn7 System Protein
MGFEWNLRRLMAGRDMYQTTDLVPLLAEYGIHLSREQVFRLVTQPPQRLSMDTLAALCGILDCSPADLIQIREVRQQVAKPTASGDTDGPAVAPPARRVHVRRPDGL

SEQ ID NO: 5159 - protein, 383 aa, synthetic construct
  REGION 1..383: note = TnsF-Tn7 System Protein
MINALTAAATPRSVLLWMRKDTSGAALLRDMLAAGYPITHELLDTFPGRQAAVHLRHLLVHVGILPERDEYVASMELWLKRYLADTQAHHRGILQPYAQWVVLRRVRHQARTRGNSRSSINYARSQVSATLDFLKWVEAQKLTLASVTQAEVDRWLAEGATSRRRLRDFLRWARRCHLVDDLHVPWQPDGEPANFLDEDEHLALLHRCINDPALPLDVRTAGSLILLYGLPVTRVAQLTHQNVEKRGVDSYIRLGEHAVVLPPALARLLDEQMRVPVLSVVERRTPRRQDGWLFPGALVGRSIDGSKLSGKLLRHGIDVRPARNTALMTLASDLPAPILSKILGIHINTAVDWVSYVKRDWSSYIAARETATGFHGALRTPDE

SEQ ID NO: 5160 - protein, 383 aa, synthetic construct; identical to SEQ ID NO: 5159
  REGION 1..383: note = TnsF-Tn7 System Protein

SEQ ID NO: 5161 - protein, 360 aa, synthetic construct
  REGION 1..360: note = TnsF-Tn7 System Protein
MLVGGVSFLDPAPAVFEAMLEGWATQQRARFLKADTIRARIDLVRRFASFTNQYPWQWQAAEAEEFIAGLRSGQRPVMVSTARGYQNALRLFLEYVTDARYAWPAVCQERFGDVPAQILHEWNTVAHTSEYEGRPGRRPLSYDEVQALLDAADARVDEIRSRRRKGAVAAMRDAALLKTVYAFGLRRREAWGLDVVDLRRNPRAADYGNCGALFVRFGKSSRGGQPKRRTVLTVPEMDWIVPVVHQWVSEVRPLFAPGSHPALWVTERRGRLSWRGINEAFEEARNAAGLPEELDLHSLRHSYVTHLIEFGYPEKFVQDQVGHSYASTTAIYTGVSDEYRNRLVQQSLRQRHADLWEPQQ

SEQ ID NO: 5162 - protein, 106 aa, synthetic construct
  REGION 1..106: note = TnsF-Tn7 System Protein
MGYHWHLRQVMATRGMFQTSDLVPLLAERGVHLSREQVYRLVTQSPQRLSMDTLAALCDILGCGVQELIEVTVVEQVVRKAGTAGPIGASAAPRVQRATIRRPDLS

SEQ ID NO: 5163 - protein, 351 aa, synthetic construct
  REGION 1..351: note = TnsF-Tn7 System Protein
MRPQEVRDLLRQLATGTIPLSHEGLDAEPRSNRIEHMRSILEAHELLPQRDHHLALFERWLTAKLGAVDDPKIRQPAEQFARWHHLARIRRASRPGTGSRGPVHGAKQEITETIRFLIWLRDTHHRYLQDCSQLDVESYVADGPSTRMNLRTFLVWCNQTGTKTGLTLPHRQARRQPRLTQQERLNWIRELLTGDSESLPYRITGTLLLLYAQPITRLVTLRTDDLSITPDGPSLTFGTDPVPIPEPFAQMLISHVQDRPNQRGANHASPWLFPSTRAGRHLHPNTVHMRLRALGISNLAARNRAIQDLVMEIPAQIVADLLGYSDAVTNKHAQAIAAPHAQYIGVSREPE

SEQ ID NO: 5164 - protein, 143 aa, synthetic construct
  REGION 1..143: note = TnsF-Tn7 System Protein
MVIEVNPRNTVQGRPRTSGSRVCARCYRAAAKYRIRWPEGPICGICFHNAMRTHGNCAHCDTDRLLPGIDELSASPICAPCAGIPSIICASCGSEAEHTGATTAHAAACAATYKPCSWTKPTSPTPCDDSSTYSLPLSDPRAS

SEQ ID NO: 5165 - protein, 351 aa, synthetic construct; identical to SEQ ID NO: 5163
  REGION 1..351: note = TnsF-Tn7 System Protein

SEQ ID NO: 5166 - protein, 795 aa, synthetic construct
  REGION 1..795: note = TnsF-Tn7 System Protein
MTSTSTAERTSTPTAADRYDTIRVRGARENNLKDVDVDIPKRRLTVFTGVSGSGKSSLVFDTIAAESKRLIDETYPAFVQGFMPTLSRPDVDALDGLTPAIIVDQERLGANPRSTVGTVTDANALLRILFSRLGEPHIGSPNAFSFNVPSVSASGAITVERGGRTVKEKATFHQLGGMCPRCEGRGSVSDFDLTALFDETKSIAEGALLVPGYGPGTWYARIFGSGEFFPADKPIKDFTKRQLHDLLYKEPTKIKAEGVNVTFEGLIPRIQKSFLSKDVEAMQPHVRRFVERAITFGTCPDCEGTRLAPEARSSRIRGKNIADLCAMQITDLAAWVRELDEPSVAPLLEGLRDLLDSFVRIGLGYLSLERPSGSLSGGEAQRTKMIRHLGSALTDVTYVFDEPSIGLHPHDIARMNELLLQLRDKGNTVLVVEHKPEMIAIADHVVDLGPGAGSAGGEITYTGDLAGLRASGTVTGRHLDDRARLKDSVRSAVGAIEVRGASANNLRNVDVDIPLGVLVAVTGVAGSGKSSLIDGSVAGRDGVVVIDQSGIKGSRRSNPATYTGLLDPIRKAFAKANGVKPALFSANSEGACPVCNGAGTIETDLGPMASVTTTCEECGGRRFQAEVLEYTLGGKNIAEVLEMSVGEALQLFGEGEARTPAATAILERLADVGLGYLTLGQALTTLSGGERQRLKLATQMGDRSAQVYVLDEPTTGLHLADVEALLGLLDRLVDSGRSVIVIEHHQAVMAHADWIIDLGPGAGHDGGRVVFEGTPADLVASRATLTGRYLAEYVA

SEQ ID NO: 5167 - protein, 795 aa, synthetic construct; identical to SEQ ID NO: 5166
  REGION 1..795: note = TnsF-Tn7 System Protein

SEQ ID NO: 5168 - protein, 366 aa, synthetic construct
  REGION 1..366: note = TnsF-Tn7 System Protein
MAVDAVGRYVDVAGLQALRPEEHVFREMLDGWRNQQLSRNLQHATITAREQFIQRFVGATNEYPWRWSVAHVDEFFGDLRSIRQVRRSTVRGYQNALRLFCDYVSTSDYGWPSVCERLFGTHPSQVCFEWNTARHVQDEESDPTRRAFTRAELQQFLDRADDEVVDITARGRKGWLAAYRDSVIFKTAYAWGLRRNEARHLQTVDFSRNPHAPEFGRHGVLQVRWGKAKKGSPPKRRSVLTVFDWAPEVIEDWLATGHPRSGAGLDLFVTERGTLVSEAALLARFRRYCDELGLAAGLDFHSLRRSYVTHLIESGMDALFVQQQVGHEHASTTAIYTCVSSDFRVKTLRRALDGTLKAALAGYESE

SEQ ID NO: 5169 - protein, 215 aa, synthetic construct
  REGION 1..215: note = TnsF-Tn7 System Protein
MSVVQLKGVEKSYHGRALFTGVDLDVQPGSAVGIQGENGSGKSVLLKILTRFTSPDAGSVEIDEKYLSRDRVFPEGFGVMIDRPGYIPNQTGFENLQSLASIRKTISAEKVRDTMLLVGLDPDLPQKAKHYSLGMKQRLGLAQAIMEDQPVLILDEPLNALDEEMATTMRMLLRRLVDEGRTLVMTSHQREDIEFICDHVYRIRQRRLIADEKTS

SEQ ID NO: 5170 - protein, 215 aa, synthetic construct; identical to SEQ ID NO: 5169
  REGION 1..215: note = TnsF-Tn7 System Protein

SEQ ID NO: 5171 - protein, 82 aa, synthetic construct
  REGION 1..82: note = TnsF-Tn7 System Protein
MLELRPNCECCDRDLAVDDEAYICTFECTWCPACVATFPDRACPNCGGGLERRPVRPASLLERYPASTERVVSDGCRAAANR

SEQ ID NO: 5172 - protein, 110 aa, synthetic construct
  REGION 1..110: note = TnsF-Tn7 System Protein
MRKTITYQWHLAELMAKAGMHNSTDLLPHLLERGIDLSPSQAYRLVTGRPERVSIQFLAAICDIFDCELNDLITYTAATQTKRRAAAGPNVVDLDKTARPRRARIVPDGD

SEQ ID NO: 5173 - protein, 652 aa, synthetic construct
  REGION 1..652: note = TnsF-Tn7 System Protein
MTTAPAVPLPEPDDIVVSVMAGIEPDLAEEVVRQAVADAAASRAKRRRLARALTDDPDLLMSGHPEGPAVIGDFVRALLAHGSRRAVLPKCPECGSTKKLTSLRADGKRICQPCDHRIRASSLSCVECSRPARIYRRTRTGEAICRDCFTLPDGDPVDLITAAVNAVAQDADPAAVRRAVESVAPVGNVYLMFRLLWKIEDTPGLLTGEGAKGSARAARLITALTDAGVSVTAPACPCCGEVRPLSHVLNGSRCCLTCYRKSNSAPCGHCGKERAVATRREDGTPLCSVCMRHEADRVITCVLCDRVRPIGRRTKDGPLCRACFRPTLRICSFCGKGPRRCYRAATGMPRCDTCSRARRTCLGCGKNKHAAARTEDGHLCETCWQKNPISFNPCRLCGTVEYLHSYGRCHSCVHDQQVRQALSRDGAMRPGLQPVHDVLVAGGAKAGLSWLERPSARTILDALADGTCPPTHEGLDALLPNKSVAFLRAALVTAGVLPARDERFAALEQWIASATEAVPDDGERKLVRRFATWHHLRRLRRQAAKKPVTSTQATAVRASIRAAVALLIWLGEHGTDLQHCTKVHLDEWIDGGTTTRYDARGFLECIGLSTQLPAAVLTELLGISPETATAWTQEGGHWARYAATVPAKSTSR

SEQ ID NO: 5174 - protein, 652 aa, synthetic construct; identical to SEQ ID NO: 5173
  REGION 1..652: note = TnsF-Tn7 System Protein

SEQ ID NO: 5175 - protein, 361 aa, synthetic construct
  REGION 1..361: note = TnsF-Tn7 System Protein
MELVDGVALLHPEDAVFEAMLSGFAKQQRGGRRLDKKTVKGRDGQLRRFATFTNEYPWNWTAAHMDEWMVSLISEKGLSHSTLRSYQLTVRLFCDFLISPAYEWAAECEKRFGTHPVQICHEWNTVQHLTDYEGQGERRPFTREELQKFFDYCDDRIDVAARSRRKGALAAYRDATLFKVLYGWGLRRNEGCKLGLVDFHRNAAAPELGRYGMLQVRWGKATKGSPPRRRNVASVMPWAVEAVEDYVVNIRPRFGVPDHPALWLTERGGRLQPREVNDRFTSYRDAIGLPPELTPHSLRHSHVTHQIEDGADPKFVQDQVGHRYASTTAIYTAVSGDFMNTMMRKALDRAFERDADWGGTG

SEQ ID NO: 5176 - protein, 110 aa, synthetic construct
  REGION 1..110: note = TnsF-Tn7 System Protein
MTAKLDYTWRLREIMAEQGMFTTAALQPLLAERGVTLSTSQVYRLVTEKPERLSLKVLMALIDIFGCPMDDLIRPTVAAKATRSKRTADGTEAGIGTFRPKRARITGPEK

SEQ ID NO: 5177 - protein, 371 aa, synthetic construct
  REGION 1..371: note = TnsF-Tn7 System Protein
MAAEPFAILNWLRMPQPRKVLAAIGAAGRPLDHELLDSLQHRRAVDHIRAALVADGVLPERDEKLEQLIVWSKTQVAASAGSQADLKVLSSYLTWHHLRRLRRQSEKASITNAQAASVRREIKGAVAFLSWMNARSVRLSECTQSLIDDWLATADSNRYFIRTFITWSAQRHSCPKGLSIPITSRESPKTPIEQDLRWQIVRKFLHDNTIDTSDRVAGLLVLLFGQQFQRIVELRKEDVSPSGETILLGQVPVALPPPLDALTRELADRPYGRSVLGRTTQNPWLFPGARAEQPLNSAQVMARLQRHGLQGRPARNATLMDLANQLPAVVLSKLLGIHLSTATKWTAEAGQPASDYASAVRGRRTRHGAAR

SEQ ID NO: 5178 - protein, 371 aa, synthetic construct; identical to SEQ ID NO: 5177
  REGION 1..371: note = TnsF-Tn7 System Protein

SEQ ID NO: 5179 - protein, 384 aa, synthetic construct
  REGION 1..384: note = TnsF-Tn7 System Protein
MVEKNDSHVPLALVQGVSFMHPEDAVFEAMLQGWEKQQLGGRLKQPKSVNAQIGIVRRFMKYTNEYPWNWSAAHMDEWGSDLISHARASSTIRNYQSAIRLFCDYITSAHYGWINLCENRFATHPVQICHEWNTTAHLVDYEGATERRPLTREELQRFFDYADRQVELMMRSGRKGALPAYRDSTVFKLLYGWGLRCSEASHLDVIDFHKNSKAPELKKFAMLHVRYGKRSRGSPHRRRMVHTLMPWAAEAVADYVENVRSLYRGGAEHPALFLTERGGRLQPRHIEERFAAYRDALGLDHHLTPHCLRHSYVTHLTEDGVDPKFIQEQVGHRFASTTGIYTAVSGDFMNAMMRKALDQMLTQESPALLNNTTDINQERTNAKT

SEQ ID NO: 5180 - protein, 726 aa, synthetic construct
  REGION 1..726: note = TnsF-Tn7 System Protein
MATEIIRGTTTKPAATDELIALFLSDTEVDGQLIVGFPNLGGQPGDATADALWVSQQFGAVLFDLVEGSELSDFDRRQEDLFRLFQARLYTHRELVKNRQLIVDVEVVTFAPAARVEAVPTDGHNSVVANSENFFDVIRELPEQNLDSDTYEKLLSAAQSISSIRRARQTRTVEKDDSRGAKLLNLESTISTLDNRQHRAVLETIDGVQRIRGLAGSGKTIILALKAAYLHSRHPSWTIAVTFYTRSLKEQFVRLITTFCIEQTGQEPDWQRLHIINAWGGRGGMSRTGIYKRFCDENNVEYYDLQSASETFGKTNAFGGAVQAALAQAPNPVPVYDVILVDEAQDFPAAFLRLCYWMLDNNRRLVYAYDELQSLTGEGLPDATEIFGADANGKPLVSFKWEPYDQGARRDIVLEKCYRNSRPVLTSAHALGFGIYRKPRYNDETGLVQIFEQTLLWLDIGYKKTEGELADGEVVSLARTPESSPKFLETHSESEDLIQFHIFESEKAQNQWVAEEIRRNLTEDELRHDDVMVISPNPYTARGNLGPLRNMLLNKGINNHMAGVDTSVDEFFVPERKSVTFTGINRAKGNEAGMVYIVNAQEGNDSRANLAAVRNRLFTAITRSKAWVRICGVGLEMNLLAQELDAVKTNGFQLRFQYPNEAQREHLSIIHRELSTAAQAELSEAGDTMRKFIQRVRSGELYKQDLPSEILDQLRAILDDEGQERG

SEQ ID NO: 5181 - protein, 726 aa, synthetic construct; identical to SEQ ID NO: 5180
  REGION 1..726: note = TnsF-Tn7 System Protein

SEQ ID NO: 5182 - protein, 110 aa, synthetic construct
  REGION 1..110: note = TnsF-Tn7 System Protein
MRKLDYRWHLRELMALQGMFSTTDLRPMLAERGVILSASQTYRLVTEKPERLSLKTLVALLDILGCHMEDLIEPFAAGNRSRAQKAVGKGQQSATGVGLHRPKRARIVPN

SEQ ID NO: 5183 - protein, 425 aa, synthetic construct
  REGION 1..425: note = TnsF-Tn7 System Protein
MTTLTCGGCGAPGRRYRNGLCQPCVLTADLRAVLDDGAGGIRPELLPFFDALRTMTKPIAGISWIRRPHVDAMLRTLADPATALTHQTLDSMTPWRSVTYLRDLLMLHGVLPAADRHLLLFQRWLRAVLDEITDPGQRQLVARFAAWHVLNRLRRFAARGPLSQTQTNQARDQARDQARDQVRSAIAFLTWLETRDKNLADCRQADIDAWYADGYTRRRNTHPFLRWAMNDKALPTVTIPHQPTANPAPLSQQRRLQLLHHFLTDDQIPLLTRVAAVIVLLYAQPVTRILRLTIDDVIRDGPAVSLQLGDPPSPVPEPFASLLLAYLDQRLNLTTATNSGSRWLFPGRRGGQPMTSDAITRRFRDQGINSISGRTSALRYLVLQAPAPVISRMLGYTDQQTSRTTADAGTPWSRYAPDDHHRWDA

SEQ ID NO: 5184 - protein, 373 aa, synthetic construct
  REGION 1..373: note = TnsF-Tn7 System Protein
MRGEVPGAARLRLVDGVPLLRPEEQVFTAMLDGWRNQQLARNLSFGTIESRQRAVRAFAHSADALPWVWTPQLVDEWMGDLRSVRDLKRSTLRNYQDALRSFCHYLTDPAYGWAAECEDRFGTHPIQVVHEWNSAVHVQEAEAEPTKRAFTLEEIQAFLDYADDQVTAVRGRGRKGWLPAFRDATLFKVAYGYGLRRRETRMLDPVDFGRNPQAPEFGDHGVCCIRYGKAKPGSPPKRRSVLTVWGWIVEAADQWETEVRPRFSTATAGTYWPSERGPRVGYSQINTRFAIYRDALGLDPALDFHSFRRSYVTHLIEAGWDARFVQEQVGHEHASTTSIYTCVSSDFRTRTLRRALDATLDAALRPDRAGSSR

SEQ ID NO: 5185 - protein, 110 aa, synthetic construct
  REGION 1..110: note = TnsF-Tn7 System Protein
MKRQVGYQWRLREVMAESGMFDTTDLIPLLADRGIKLSSVQVWRLVTQTPERLSLPVLAALCDIFSCGPERLIATKAENTTARKTAGHGPEVVDLAEVVRPKRARIRPDQ

SEQ ID NO: 5186 - protein, 182 aa, synthetic construct
  REGION 1..182: note = TnsF-Tn7 System Protein
MKFLVWLHETYQRTAATCTQQDVDEWLATGPTTRSAIRTFFVLAKSRLNIQVTIQHRAAKTSPSLSQDQRLAWIHELLTGNSESLPYRVAGMLLLLYAQPLVKVVTFPTSIVDGSETGMSIKLGGHPTDVPEPFASLIREHLATRPNHVPAPEPTALGCSRAPSPAATCMRTPSWTGSGTSA

SEQ ID NO: 5187 - protein, 182 aa, synthetic construct; identical to SEQ ID NO: 5186
  REGION 1..182: note = TnsF-Tn7 System Protein

SEQ ID NO: 5188 - protein, 977 aa, synthetic construct
  REGION 1..977: note = TnsF-Tn7 System Protein
MRFGVLGPLHAQIAGREVRFDGPRQAKMLAALLVDANNLVTVERLVTVMWDGEAPATAVRQVQDALSGLRRNLAACGAPASLISTRRRGYQIDLAPDQLDLLEFDHERRIAGRHETPLETAVALRRALACWRGDALADVSSRVLELDAARLNEKRVATHKQCLGVELDLGRHREVIEELTALLREHPYDEHVAEQLMVALYRCRRQGDALQVYERLRRRLAGELGVDPTPPVQALHQRILAADPALAAPVPASGFHDAPPESPGVAATGPAMAMPVRQLPLDVPDFVGRADALAELGRLLDGSAPNRAPVAVIVGGPGVGKSSLVMHAARRASAIFPDGQLYLNLAATSDEPRDPALMLAEALRALSIAGSAIPNGLSERAALYRSLLADRRMLVVLDDAGHADQVLPLLPGADGCAVLITSRTLLTHLSGTRQIDLDVLSPAEARELFTGIVGRRRVEREPAQADAILDCCGNLPLAIRIAGAKLTARPAWSLRVLQERLEDESRRLAELRIGDLSVRASVELSLRVLPADAVRALGLLGLLGAYTLPGWVVGPLLDRPDAEEVLDTLVDASLVRLTATDAIGQPRYRLHDLIRTCAVEIAARLPAADQRDAIIRVLSTWLDLAGRGTERLPGGLLVPAPGSAPRRSLPGAVADRLLADPAGWFDAERDNLLGAVKLAVDRGLDELAWELAAGAVTYYDHRCLYQDWQHGHQLALDAAEAAGNTRGASVLLRGLGQLHIYQDEFDRATRALESSLGLCRDGGDKRGEALSLAMLGTVSRVQDRDDEALERVEQALAIAVGEGDRHIEAQLSCSMAVMMLMQGKLEEAEFWFARALSHARAVGDGHRVAVVLRRFSRLHDRRGDPDEALRCLWQALATFEELADDRCAAYTLLELGRVYAGQHDLHRADPALQRAAEVFHRHGDRQDEATCWQLIGDLDATAGLHDLAHQHHQRALRLWQTIGDTNQAKTAARPSSP

SEQ ID NO: 5189 - protein, 977 aa, synthetic construct; identical to SEQ ID NO: 5188
  REGION 1..977: note = TnsF-Tn7 System Protein

SEQ ID NO: 5190 - protein, 307 aa, synthetic construct
  REGION 1..307: note = TnsF-Tn7 System Protein
MIEADELTKTYGRRKAVDRLTFRIHPGRVTGFLGPNGAGKSTTIRLILGLDQPSGGRVRIDGRPYRALERPLRQIGALLDATAVHGGRRARDHLRWLAQTNDISAGRVTEVLRITGLADAAHRRVGGFSLGMKQRLGIAAALLGDPGILIFDEPVNGLDPDGVHWIRGLLRSLAGEGRTVLISSHLISELQLTADHVLILGRGRLLSDSSMADLVHHAGGGDVLVRTAAETPLAALFTARGASVTTEPRHGLAVAGLTPGDVAAIAAAHSIPLLELTPRPPSLEDVFRRITDPGLQYRSGPHREDAR

SEQ ID NO: 5191 - protein, 307 aa, synthetic construct; identical to SEQ ID NO: 5190
  REGION 1..307: note = TnsF-Tn7 System Protein

SEQ ID NO: 5192 - protein, 400 aa, synthetic construct
  REGION 1..400: note = TnsF-Tn7 System Protein
MLSRNWSREAFEGFCSELVNRVGAKLAALRLERYALFFAKLDAACANPTELSADLLIGLFGNEGLRRQAVPYGYLLRTGLAPQETEVRRELMIEESRQQSILNRAQGHWYLDLLNRYQRHLSEISGRYQDRGWNDEKRRFGPRTITANLRASELFLGHLETIHGVDEIQRIDQVHLNRFILDNPGYRESIRAFVRFLNRKVKLFRKVRVETVTRALPEGLFLERTRYQDLLGNWLRAGKKDRKEALIGLFMLLYAQSIKKVVRLRVSDMLKGIDGTYRISFGRAEIALDKRVSELLERYLKERRALATMEDDWENAYLFPGRRYGGHLSEAAISNQLKKRELSAEQLFASALYYAYLSGMRHPKVLVRAFGITDYTAIKYLNLINPRLTAETNMRTVRNG

SEQ ID NO: 5193 - protein, 374 aa, synthetic construct
  REGION 1..374: note = TnsF-Tn7 System Protein
MKNENAQALALVQTREIVLPEKDAALFREMLGAWATRRLGALRHRPSSVNRDVSILLDMARYTCQPPWHWTEDNFEAWCYEIGVIRQLAVTSQRHYQGTIRTFLGYLTENVRFRNEVRRLYGVDLVQICHAENCIPHVIENERTKERRALTHAEITDLFARLDDEILQAGRFSSKDFRPLQRDKALFFTIYAAGLRVSEARGLDMASFQPNPAIPKFGRFGFVSVWGKGTRGSGKRHRLVPVTHAGLPPLLEWYCEAIRPQFLTNSAPDEQALFLSERGRRMALSTIESRFQHLMAVAGLEGQYLVPHCLRHSSVTHEALRVSLEANRLKHGHTYAATTQSYMHVPDEFVNEEITRAISNQLDSLMQRDDDDND

SEQ ID NO: 5194 - protein, 70 aa, synthetic construct
  REGION 1..70: note = TnsF-Tn7 System Protein
MAKDVAYRYRKHTEGRGALYTKLNPPERLLAKTLCATRLEATRLERTLKSMSSLDKRRWALRLSENPKIR

SEQ ID NO: 5195 - protein, 431 aa, synthetic construct
  REGION 1..431: note = TnsF-Tn7 System Protein
MRELICPRCHLCGQRHRWWAHRSDGIICPRCHLTERLTELLDDGTGRIAPALLPLHEAYTAQPNPDAGLVWLYCNRHVPPLLTALATGHLPLSHEALDDHPSSQTAMHLRDLLMQYGVLEQRDRYLVHFENWLRQFLAGNTAAEDRQLIQQFATWHSLHKLRHRAEHKGLTPGVTARHRLEVAFAQRFLAWLREHDTALVDCTQAHMDLWITSGNTSRQCSRAFIVWARANGILARHLQLPYPKKQPREALTHRDRLQLLHELLAPQRSRLLRDRAAAILLVLFAQPLTRIATLSMDDINLTSSEVQITFGQHGPVPVPEPFGQVLREHAENRGPYNIAANRTSPWLFPGRCPGRHIHPVHLRNCLRDSGIPLVRSRITALRALVSEMPPAIAAQAVGYTARCVEEHANTIGMSWVNYVPARRGSGELTTS

SEQ ID NO: 5196 - protein, 431 aa, synthetic construct; identical to SEQ ID NO: 5195
  REGION 1..431: note = TnsF-Tn7 System Protein

SEQ ID NO: 5197 - protein, 368 aa, synthetic construct
  REGION 1..368: note = TnsF-Tn7 System Protein
MSGSEGSARLYLASGVPLLHPEEQVFTAMLDGWRHQQLARNLGFGTVEARERLVRRFYGFAEASPWAWTATDVDEFFTDARAVKNLSHTTLLGYQNALRLFMAYLTDPHYGWPAECEQRFGTHPVQICHEWNTARHVQEAQGRPGKRALTHDELQAVLDHADDRAVAAQSSGRKGWISAFRDAVLLKTAYAWGLRRNEVRNLELCDLATNPKAREFGAYGIIRVRYGKAMRGSPPKRRSVLTVPLFDWAVEALQQWTEEIQPAIAGANNSCLWPSERGDKLAAATVTTAFTRCRKELDLPERLDFHSLRRSYVSHLIEAGYDALFVQQQVGHEHASTTALYTHVSPDYRARTVRAALDRITTPIKESS

SEQ ID NO: 5198 - protein, 96 aa, synthetic construct
  REGION 1..96: note = TnsF-Tn7 System Protein
MAARGLHTISDLIPLLTERGITLSASQIYRLVSTRPDRISLTVLGALTDALECTVEDLCAFRAEAAPIRKAAGASPTVIDLNTTIHPKRARIRRTD

SEQ ID NO: 5199 - protein, 398 aa, synthetic construct
  REGION 1..398: note = TnsF-Tn7 System Protein
MALTDPERGIAEQLTPLIHAFDQIGKPHLVMAWLGGPTGSGRLHELAALAHDEPITHQLLDRYPQTFDLHRLRDLLVHTAVLPGRTELLDRNDVWLDTILNQAPPQHSRIVRPFATWHVFRRARQRARRRPTTSSAATWARTQTLLALQLLSWLDEQGKDLATATQADLDIWLDHGRDYRHLVRGFVTWATERRLCAELQVPTRNRSDPANIVAESDRWTLLTRCLRDEDLPLDVRAAGALVLLYGRTLTTIAQLTAADIHRLNDGTYLHFRDAPVLLPPALAAVIHAQRCSDTPGAALHDLDPQTRLLFPGRSPGRPAAAKVLARKLRQHGIEPRPARHAARSAWASEIPAPIAADLLGIHINTATKWAARARRDWTGYLAARASQRPDLRNTAPGE

SEQ ID NO: 5200 - protein, 582 aa, synthetic construct
  REGION 1..582: note = TnsF-Tn7 System Protein
MSADKNARHVEVKAGGLGLACGGLTAMIDTLPFHDDAALSTVGDVTAFGYTTSALLLGGAIAHNRWRHMPHKRLQRELGDDGWLNRFDLRDSAGAAAMHRQAAFLRSDLASRPGGSRRRRPAVTELATHVGKVVSGPFWMRGRSVYSPHSRGTLVLGPQGSGKSSWLVHKVFDFPGGVYVSSTKPELAALAAAARASRGPVHVFNPANIGGLASSFGWDPVQGCDDQAVADAQAWALVRGGGGAHGVERSDFWAQKAQEIIRCYLMAAALAGYDMGAVHYWATKPDDPTPVGILETHPDRAPSAWVGTFKTHLAASPNTRTGYFATVVSCVGFMDNPTVAAACRPAPGQTFDIHEFLRGGALFVIAGDDKRLSPLITALTEHVFRQAKIAAAACPGGRLPRGLAMILDEVAQTTPVPLDKWAADSRGWGIDVTAVVQDLAQLRTTWGPDRAKTIYANLPTKVVLPGVASKDDLEELAYLAGRRHVQKLSHGESVQDGAGLLGRRSVSTTRHVTVEPVISGETIYGLPPWHAYVLGLARRAVVVKFEPGHKRARRVQRQLNQPTDDQPHDPFLPPLDHAGATT

SEQ ID NO: 5201 - protein, 582 aa, synthetic construct; identical to SEQ ID NO: 5200
  REGION 1..582: note = TnsF-Tn7 System Protein

SEQ ID NO: 5202 - protein, 398 aa, synthetic construct; identical to SEQ ID NO: 5199
  REGION 1..398: note = TnsF-Tn7 System Protein

SEQ ID NO: 5203 - protein, 110 aa, synthetic construct
  REGION 1..110: note = TnsF-Tn7 System Protein
MIKKMGYRWKLRTLMAEREMFQTSDLVPLLAERGIHLSREQVFRLVTQPPQRMSMDTLAALCDVLSCTPNDLIEIDLVHTQAAKPTGTTGGGRAGPPSGRRTVIRRPPGS

SEQ ID NO: 5204 - protein, 320 aa, synthetic construct
  REGION 1..320: note = TnsF-Tn7 System Protein
MMVYAGVLPKRVEPLERIEPWLASLLSTLSAHQAKVIGPYSQWSVLRQARRRAVRRAYTFGSAERDRSKINAAIGLMEWLQVQQVPLHALSQSRLEVWLEDSGCRVSAIVGFIAWLNNQRITDALEVHQRPHPEPSHFPDSEQQLGTIQELLSETCSLATEVRVAGLLVLLYGVTVTGICSLTVDDLSDVNSKSFLALATHPVLLPPTVAVLITKLAIAARPSVSRRDGPQYLFPSPQRIGSHISAGSLTRRLNEAGIYVRVNRNGALLTLAQDLPAPVLAELLGLHISTASQWCRIAQRDWSHYLSARSEKVSTTTARD

SEQ ID NO: 5205 - protein, 361 aa, synthetic construct
  REGION 1..361: note = TnsF-Tn7 System Protein
MATITYRNATCIYEGSDKLAVDSLNLDIADGEFVVLVGPSGSGKSTALRMLAGLEDIDEGAIEIGGRDMTGVPSKDRDIAMVFQNYALYPNKTVAENMGFALKLRGVPSSERRKKVEEAAKILDLTEFLDRKPAKLSGGQRQRVAMGRAIVREPQVFCMDEPLSNLDAKLRVQTRTQIAALQRRLGTTTVYVTHDQVEAMTMGDRVAVLRFGKLQQFASPNELYDRPANAFVAGFIGSPAMNLVTLPIAADGVRVGESTLPIERDRLTKLSDAGMSEVTIGIRPEQLELTDTGGVPVVVDLVEDLGSEAYLYTHAGSGSGVELVARCNPRSAPKLAESVRLRKHPDGFVHLFHPQTGERID

SEQ ID NO: 5206 - protein, 361 aa, synthetic construct; identical to SEQ ID NO: 5205
  REGION 1..361: note = TnsF-Tn7 System Protein

SEQ ID NO: 5207 - protein, 360 aa, synthetic construct
  REGION 1..360: note = TnsF-Tn7 System Protein
MLAANVVPLDEEATVFRAMLEGWARQQRSRFFSETGTIAPRLRLAKRFASFTGLYPWQWSAAEAEAWISDLRSGSERVAVSTARNYATELRLFCEYLVDRRYGWSDICAERFGQRPEVVFHEHNTTPHVLEYEGDPRRRPLSYDEVQALFDAADTRVDTKRAQGRKGATSALRDSAMLKFCYAYGLRRTELCGIDLVDLRGNAKAPEYGQFGLVSVRWGKASKGSPPKRRSVLTVPEMDWVVEALDHYLSEVRPTLVPKTFPALWVTERVSRLSPRAVNEAFVTARDHAGLDKSLDLHCLRHSYVTHLIEFDYPERFVQEQAGHSFASTTAVYTGVSNDYRNQLLMRSMSKRLGENWSGA

SEQ ID NO: 5208 - protein, 106 aa, synthetic construct
  REGION 1..106: note = TnsF-Tn7 System Protein
MNKKMGYEWHLRRKMAEHNMFHTSDLVPRLTERGVVLSREQVYRLAAQAPQRMSMDVLVALCDILDCSPNDLIEPIVVNQQERKAAGGKSGRPVSRRTSIRRPESL

SEQ ID NO: 5209 - protein, 497 aa, synthetic construct
  REGION 1..497: note = TnsF-Tn7 System Protein
MTGPASRCDRCRREVIARYRLLGGRICNPCYSWLRRHPAPCPLCAQTRVLAHLGTHGAAFCSPCAGQPGRFGCRTCGREENLQGSHCAPCRLDSRLRVLLDDGTGDVAEPLRPLHSYLLSGGGSDLVLKWIRREPVPSTLRAMATGTVVLSHQTLDALSPSTKLRYFRRTLMSAGVLPEIDVLLHDLETYGTRLLATLPAAHSALLGRFFRWHMLPLIRRTLQDRPMTRGTFSARRAQLRYIAELLQWFDTHGMTIETVDQPAIDRFVSADRVRQQVGPFVTWAVQERIAPNVAVTTIRSRGAGSHLSDPDLAAIARQVFADETIPLPTRLITLFAVVFAQPVEASIALTREQIIDGSGPMTMTFARTPIPVPDRLAALVRTQLRALDARPSRHPDMHGWLFPGTMPNQHVTAASIELVASRHGLTLRHFRSSRLQHFAQTVPASVLADVVGVTADTAYRRSIDAGGAWSDYPPLRDLGEGQRSLRKFHSPAPDSRN

SEQ ID NO: 5210 - protein, 497 aa, synthetic construct; identical to SEQ ID NO: 5209
  REGION 1..497: note = TnsF-Tn7 System Protein

SEQ ID NO: 5211 - protein, 372 aa, synthetic construct
  REGION 1..372: note = TnsF-Tn7 System Protein
MSDSSFAPIPFQLRQNIVPLHEEKFMLDSMLDGWSEQQSSRGLERKTAATRAKLIRRFQEFTETYPWEWTSSDLEAFSVHLLSGRRPLAKSTLRAYQTMIRMFCDYLVDDRYGWRQACSDRFGTSPRQICHDWNTVVHLVEYEGRPQRRALTYDELERFFEAADERVLRIQRAGKKGALAALRDSLIFKTTYAFGLRRAEVAGLDVPDLRSNPSAPTFGTCGVVYVRWGKGSRGSGPKRRTVLALAEYSWAVEGLLHWVKSDREHYGAAESGPLWPTERNTRVSLRYLDQRFAEIRDEVGLPPELSLHALRHTYVTNLIEWGYAERFVQDQVGHAYASTTAIYTSVGDDFKTRVVAQSLASIYGSTDDHELR

SEQ ID NO: 5212 - protein, 116 aa, synthetic construct
  REGION 1..116: note = TnsF-Tn7 System Protein
MTTNSDEQVQWNLRAMMSAAGMFQTTDLRAPLQEQGVVLSREQVFRLVTKTPDRLNMTVLAALCRIFSCTPNDLIEIRAVAAAAKRRANATGPSKASIGELRPIPARLHRPAEPNA

SEQ ID NO: 5213 - protein, 307 aa, synthetic construct
  REGION 1..307: note = TnsF-Tn7 System Protein
MDAVRPERAGTGRALQRLGEGGVQVGEEGARAGRLLGGHRVVPAQLGVELRHRDARLGRPAHRLRRVIELLAWLDDEGTSLDQLTQPELDRWLDEGSITRRDVRPFITWAERRGLAPNLHVPPPRIAAPKTCIKEEERVQQLGRCLSAEDLPGIVRTVGDLVLLFGFPYTRLLGLTTHDVIIGGDVVELCIDGHTLRLPPRGDQLLLEQWKISAERWTVNQTASTTPWLFPGQRPARPIRSEYLGLLLRRHGFEGLASRNSARLALASDLPTSVLADLTGTSISNATRWTGYARRDWLDYIASRTQI

SEQ ID NO: 5214 - protein, 371 aa, synthetic construct
  REGION 1..371: note = TnsF-Tn7 System Protein
MLFAGVPEDNGPYAHMRAALAECPEPRRVLNWLCSSRSARLLADLIATGRQLTHEDLDATATSRSAAMTAEYLRGLLMAYQVLPERDEPTARITRHLDPVTARHPEHAVLLRAYVRWSLLTRARRHQRLRGGGATHRIHWAYTRINLAARFLTAMTARGLTLAEVTQHYVDDWLVGGRPRPATTYAALSSGPTAATTPKALHVPHRPKADPVGLEEDSHWDLLHQCLTDATLPLEVRTAGAILLLFGQDLTRITALTTTALTTVDNTFFLTLDHAPIPLPVYLGHLLAHLARRAASTGWAANTPADWLFPGHLPGAHLSAIAVSHRLTAPPHIPSRPARTTALITLSQDLPPAGAVADVLAFHAGHRGRAR

SEQ ID NO: 5215 - protein, 371 aa, synthetic construct; identical to SEQ ID NO: 5214
  REGION 1..371: note = TnsF-Tn7 System Protein

SEQ ID NO: 5216 - protein, 340 aa, synthetic construct
  REGION 1..340: note = TnsF-Tn7 System Protein
MLRELADGTLPLTANAIITRARSGQSVAFLLSLLVRSNVLPELDVETVRFDHWFEEWLASIEAADDRLILRRYCTWELLRSTRAFRAVSQGPSSPAAGFQRQRAALKHCAALLHEIRSQHETLATFSQRGLDAFLTDSPSQRDALAPFTRWLRRHRLSTLHVEFRTSHLEGRHYESDHRWQMARRFISDLDMDPKTRTAGLLVLLYGLHLTRIVALTRDQVDVTSRPVKLTIGTEPIELPEVLGNAIAELTDASRHQSEGWLFPGRNPGLHLTPGPLSRRLRQQGLRSGSARTTALIELTRQMHPRIVSDLLGITAASAAAWSRLAGGDWTDYPKLRAEP

SEQ ID NO: 5217 - protein, 834 aa, synthetic construct
  REGION 1..834: note = TnsF-Tn7 System Protein
MAIFEYDQRVVDDLISRFGLRPPNAKGLDAVVHALSRQDECEQVVLDIATGVGKTWLLAALLEYAAASGIRNLLVVLPGKTVRTKTIANFTPGAQGFVEGAEIEKHVITPQNFTENAPVITDPDAVKLFLMNVHHLVAEDTDDYVEPGKAKSQNLRTARPQEQLGGPLLDYLSRVDDLLVVLDESHRFTGSAATWSKALERLEPAARVGLTATPERGDNVIYKYHLHKAIADKFVKTPVLARRTNGYRDNEVVGQLRDAKKLLQKKAASYRDHELRHPDAKPINPIMLVTCQDTEHADEIAGLLTSNDLFAEEQVLTVHSNAASDAMEAKLAQVQEPDSPVRVIVQVSMLNEGWNVHNVAVLVPLRALESGTLTEQLIGRGLRLPYGEYTGDEWVDSLDILSHKAVVQALKKHGISGSIRATEDIPSHSSSGAPAANTASVPAALGDPGALGDDVFWLTDDSAYAAASDDPELAAVAALSGGTRDIETLVTTLVEVEPEREKVLLLDESTFKFPLATFETEPHQLRLVDLDDEWHKKVAATIGDDFTDQIDRETIIFTDQKGVIKFETATQAELFDDPMTAEIVQDNLETHLRKLGALKNGAAGAENRRAAIAFVRRFVSFVEGEWTVRRAGVAVQRLKDAVNVAADEAAKQSREIPKVHPLTLPRRKSTELPVGVKIKPQSDVDGSPQFTRGQNYDGWRKGRYSASSFDSYSAEFQVAKLLDVAEQITWWMRLETTDGARIEYGAGRSYYPDFVALDKDGVHWIIEGKDERGRQDETVQAKRAAAERVLRVMESDPTWADVRWGYLIAYEGDVKTANSWSNLRNMSDATTMLR

SEQ ID NO: 5218 - protein, 362 aa, synthetic construct
  REGION 1..362: note = TnsF-Tn7 System Protein
MAHLSLTGITKSFGDIKVLDNVTIEASDGEQLAILGPSGSGKSTLLRIIAGLEQPDSGSVLLDGVDQAGVPPHKRDTSIVFQHFALYPHLSAMKNITLGLKHGLGLSSAEADARASSLASRLQIEPLLSRKPREMSGGQRQRVALARALARSSGTVLLDEPLSGLDAQLHETLRMEIAGLLRDEGATGVNVTHDQLDAMAMADRIVVLNRGKIEQIGTPDELYSAPRTSFVASFVGSPAMNLLPLASDGSSAFEGVSFPAGTRLMLGVRAEELTLSKDMITSPWAVQGTVGLVEPAGPDRVVKIHTARNEDIAFRCSVAETPRLGERVTVFARPGSVLAFDLATGEAIPQQRITQILNGVGS

SEQ ID NO: 5219 - protein, 362 aa, synthetic construct; identical to SEQ ID NO: 5218
  REGION 1..362: note = TnsF-Tn7 System Protein

SEQ ID NO: 5220 - protein, 372 aa, synthetic construct
  REGION 1..372: note = TnsF-Tn7 System Protein
MQDFGASPAALRLITSSSNVALANPEQQVFDAMIEGWRKQQLSRGLREQTIRNRVATVVRFRDFVDKPPWKWSVADVDEFTAESGGRTRTLSTMRANHGAIRGFCDYLTSPLYDWMEICDREFGEFPSQVCLPWNTVAHRFEFEGDGKRRPFTYDEVERLFDTADARVELLVSSGRKGALGALRDAQLLKTVYAFGLRRTEAVMLDTVDLHHNAKMRQWGRYGALHVRWAKAAGGGAPRRRTVLLVPEFDWWVPGMRQWLEQARERFAPAADLDALWVTERHTRLSAGYLDRRFAELRDDAGLSKDLTLHSLRHSYVTHLLEFGYAERFVQEQVGHMHASTTSIYASVSSDYKNRVLAEALKALIEGEADGR

SEQ ID NO: 5221 - protein, 111 aa, synthetic construct
  REGION 1..111: note = TnsF-Tn7 System Protein
MAVELETGWNLRSVMASRGIFQTSKLKPLLEERGIDLSREQVYRLVTQPPQRVRLDVLAALCDALECTLDDLVTITRREAAVPIAVGEEATRGSIGDLRPVRATIRRPRTK

SEQ ID NO: 5222 - protein, 231 aa, synthetic construct
  REGION 1..231: note = TnsF-Tn7 System Protein
MVGDGHRPADKGRAPTVRPFLLWCQTTKLTRRFRLPSPPTRRAAPLSQNERLDLLGRLLTDNDLPLRSRVAAVIVLLYAQPCSRVVRLTIDDVVHDNDQVLLRLGEPPSPVPAPFAELLLSWIDNRDNMNTATNRDSPWLFPGRRAGQPLHPFALAELVNDLGVPATASRAAAIRQQVLDMPAPVVADALGYHQVTAARLMSEAGGTWSRYAPGDHTRSPAGWTPRGTGDS

SEQ ID NO: 5223 - protein, 300 aa, synthetic construct
  REGION 1..300: note = TnsF-Tn7 System Protein
MELWFRNATKDLPTAHAEFIRPFAEWFVIRDARRRAARGRYSYGAAASDRNEIRAAIKFMQWLDRRNIQLAGLSQTQLEIWLTQASNSQRRGNAAFIRWTTKRGLTQKLEYPIYPTPAPVLFLDEEEHEKQLRRCLTDVSMPLDLRIVGSLIRLYGLQLIRIVHLTADGFHKDKSGAYFTFDKNPVLLPPTLARLIEEQIAMGRSRSALGSLAASGHPELLLPGQPASRPRSPAALSTQLMKHGLPTIAARNTALFGIAGELPPIVISDLFGVHRNTAMQWATRAQESWAGYLKALRTTE

SEQ ID NO: 5224 - protein, 386 aa, synthetic construct
  REGION 1..386: note = TnsF-Tn7 System Protein
MEQGYSTREAARIVGINLRTGKRWRNGHHSPSRGAKAVPPIYQLPEPEEPPQPSRYLQEHDRIHIADRLREKTSVRQIAAELGRSPSTISREIRRNCRVMPRGGWTYQPFHAHRRAERRRPRPKTGKIGQNPELRDFIQNHLMIRWSPEQICHALRARFPGRPEMHVTHETVYQALYVQGRGELRRELTRSLRTGRARRRPHRQSHKRSSRAIKNMVLISDRPAEAEDRAVPGHWEGDLIIGKDSRSAIGTLVERSTRYVMLVHLPNGHNAIATRNALASTVQTLPPHLWRSLTWDQGSVMAAHRAFTVATDIPVYFCNPASPWQRGSNENTNGLLRQYFPKGTDLTAHTPEQLAAVAAELNSRPRKTLDWETPAERLAKLLDLAS

SEQ ID NO: 5225 - protein, 342 aa, synthetic construct
  REGION 1..342: note = TnsF-Tn7 System Protein
MLEGWARQQSARFLRAKTISPRLRLIKRLEEFTGQYPWQWTPADGEAFIAHLRSGSDPIQMSTARTYEVTVSLFLEYLMDARYEWLDTCLERFGDVPQAVFHEGNSVLHTVEYEADPRRRPLAYDEVQALFDAADARPGRIRGQGRKGALSALRDAAVLKTIYAYGTRRTESSKVDLVDLRRNRKAPQYRKFGSVMVRWGKSSKGAPPKRRTVLLIPEMDWVTDTLDHWLTEVRPQFSPGRHPALWVTERAGRMSPRSINEAFVTARRDAELDEDLDLHCLRHSYITHATEFGYPARFVQEQVGHSHASTTAIYMGVSNEYRNTLLEASMKSRLGDYWDVAP

SEQ ID NO: 5226 - protein, 108 aa, synthetic construct
  REGION 1..108: note = TnsF-Tn7 System Protein
MIKKMGYQWQLRQLMAERQMFQTSDLVPLLAERGITLSREQVYRLVTQAPQRMSMDTLVALCDILQCTPNDLIKPEVINVQVRKTAGGDTGPTPSTPRRTVIRRPDQS

SEQ ID NO: 5227 - protein, 389 aa, synthetic construct
  REGION 1..389: note = TnsF-Tn7 System Protein
MLTERLSALLRDPSTGEIRAQLQPLFDELVGSDRPQNAITWLQRPPGHGPALLRQMATGEVAISHGTFARLPMTRGRNYLRDLLVALEVLEPYEPLIERIEPWLQQRRVGLNDVHRQTIEQFARWVVLRRLRTAAEHGTLTKAMAEGARQRLNRAIDLLAWLEHEHTTILELTQPRLELYLADQPPSVLHAFITWLNRTGINDRILVKNPSPTTANVTMGDADRWRHVGALLHDDSVLLYTRIIGLFMLIFAQPLTRACSLRTDQIRATDPGPVFVTFHNTAVEMPEPLGELIRQQLTRRGKASYASRDNGWLFPGGIPGRPMATENVRGHLVALGIAPHQARHAALFALSAEVPHMILAQTLGISLSAARTWAALASRDWGAYIAART

SEQ ID NO: 5228 - protein, 389 aa, synthetic construct; identical to SEQ ID NO: 5227
  REGION 1..389: note = TnsF-Tn7 System Protein

SEQ ID NO: 5229 - protein, 1193 aa, synthetic construct
  REGION 1..1193: note = TnsF-Tn7 System Protein
MTRMTMSMRVMSAGQGVAYLLNSVVVGDGDRDFTEPLTRYYSQAGTPPGEWMGSGLAGLGDGSINDGDVVTEEQLKLLVGQACDPITGKPLGRPWPRYRSLEERIEHRVNTLPSTMSTGERAEAASNIVEEERTRDARSPVAAFDHTFSVPKSVSALWAVADGGTQAQIVRAHHEAIREVLDLLERDVAMTRIGADAGAGSVAQVEVMGVVAAAYDHFDSRSSDPQLHTHVVIANRVQAVQDQKWRTLDGRPIHHAVVALSEHYNAVLADHLVRDLGVRWERRERGERRNPAYEIVGVDDELIQEFSSRSHDIERETDRLIEDYCDRHGRSPSRRTIIRLRAEATLRTRPDKEKHSLAELTDQWRTRASRVLGTDAPKWATALLRDGANGVPVLLRADEVPLDAIDQVAQTVVEIVGDKRSTWRRWNLYAEAARQLMDIRFASIVDREAVTGLIVDAAERASLQLSPPELTHSPAQFQRRDGTSVFRPKYGNLFSSTAVLDAEDRLLALTGILNAPTVSLRHAERAVARPTSSGHHLTPDQADAVTRVALSGRVLDVVVGPAGTGKTTTMVALRRAWEAEHGRGSVVALAPSSAAAEVLAAELRSRAENTAKWVWEHANCRWDFEPGQLVIVDEASMVGTHTLDRITAHAHAVGAKVLVVGDPAQMDAVDASGAFGLIARHLGASAAQLIAIHRFTHSWEPFATLALRTGQLSAIQTYKQHQRIIQGGYESMLDAAYAAWLRDTLAGRTSLMIAETEEAVTALNQRARMDRITAGLVRGDRGLALHDGTEASDGDLVITRKNDRRLRAGLSWVKNGDVWEVVTAHRDGSLTVNRAGRRRGMIRLPAAYVEEHLELAYSLTAHRAQGSTVDTAHAIVHSNQMTREALYVAMTRGRDENRMYIATDQFFLEEHQHRPPEEVSMEKILAGILRHAGAEKSAHETIELEQERWSTIAQVAAEYDTIAQVAQEARWIRLLAKSGLTRQQVDDIVEGDSFGPLAAELRRADAYGYRPETMVPLLIAERPLHDAEDLGAVIRARVQGATASRTGSTRSVDRSLIVGLIPRAEGITDPDMQRGLTEREEFIESRAHALVDAALAQQADWIRALGEPPPERQRGTWVRCAVTVAAYRDRRGWGGQHPLGPRPRGTYDRIGYARAARALSRAQGAAVRETVDTSVALAPEAQDVEHEALGRTL

SEQ ID NO: 5230 - protein, 1193 aa, synthetic construct; identical to SEQ ID NO: 5229
  REGION 1..1193: note = TnsF-Tn7 System Protein

SEQ ID NO: 5231 - protein, 372 aa, synthetic construct
  REGION 1..372: note = TnsF-Tn7 System Protein
MVGEFPGSARLMLVPGVVHLNERAAVFEAMVAGWTRQQLSRQLGSSTLQDRERLIRRFQDFTERYPWEWTPADVEDFTVSLTYGADRLAVSTIRGYHLTLRLFCDYVTDARYEWPMQCQDRFGTFPVQVCNEWNTVAHLNEYEGKPQRRPLTYRELQDLFDWLDARIEQIVRLGRKGSLAAWRDATMIKTTYGFGLRRNELVRLDLPDLRPNPHIRGWGTYGSIHVRFGKAMKGSLPRRRTVLAVPELDWAVEGLRQWVEEGLPLFEAGDHPALWLTERRSRVSVRHVDELFADARTEIGLEEHLTLHCLRHSYVTHLIEFGYPERFVTEQVGHRWGSTTAIYTSVSNDFKNKTLQAALARFYRTDEEASPS

SEQ ID NO: 5232 - protein, 112 aa, synthetic construct
  REGION 1..112: note = TnsF-Tn7 System Protein
MRTIQMQWNLRQVMADRGMFQTSELLPLLEERGIHLTREHVYRLVTKTPQRLNTEVLVALCDALACTPNDLIEPVVTEQRATRTGTRNEGGPKIGSIRPVRAVIRRPDGVDE

SEQ ID NO: 5233 - protein, 305 aa, synthetic construct
  REGION 1..305: note = TnsF-Tn7 System Protein
MHLARFEAWIEVAGEDIKDTQERRAFVQFARWQHLRNLRDRGEPLHHSLASSRRAELRTVVKLLVWARHRGKTLADLDQADIDTWAMTGRQPHLVAKFLDWARANHRSRQLAVARPPRHYLIVGGIHDEQRGLKLAAVLDDGTILPGTKLAAALVLLFGIRPLRISRIRLADVEHSDGAATIRFGKAPLQLPPTLAGLAAEGCSDRSARRMLGPVEDWEWLYPGARPGAPLTSASLIRRLAAIGVFVASARTGALTSLAQQLPAVVLADLTGIHIGTAVRWSNATAASNSRYAGLLLAPDGAPPA

SEQ ID NO: 5234 - protein, 305 aa, synthetic construct; identical to SEQ ID NO: 5233
  REGION 1..305: note = TnsF-Tn7 System Protein

SEQ ID NO: 5235 - protein, 166 aa, synthetic construct
  REGION 1..166: note = TnsF-Tn7 System Protein
MTEGVTAAVVELIGSVERGVSAVRIEAVVAAKASKHAHRVRLLGHLRDDPGVLVSGADSMPRVLQRIIEALIDAGATTLRLPRCPRCGAERLLPEHLDGRPICSTCYGRARKRTITCHRCGRERRLGSAFGDADYCGACWRDMYDDAEAMFLDAAGLALRTSIPPP

SEQ ID NO: 5236 - protein, 282 aa, synthetic construct
  REGION 1..282: note = TnsF-Tn7 System Protein
MSANAPAPFLEQLWASLDGLRCVVVVGLPGTGKSLLVRELAAAAREASRKSTLLQWDVCRESWEGHPRTRSRYPEVDGVTHEGVRVAMGSWVRGAVAAWFAAHAGDEALLIVEAPHIGGRFSELAHAVDDEAEPHLSAPETAFVVVAPEKDLQLALKQQRAADMEDRPRAGGYEQNNASPDLLDELTRSLRGPAHELGIEAGDEQGYDPDLYAGLMRRVLRHRHTTVVRPDALIQVSGSVYDLAEDSERLWADEQEVEASLGVADAMDETELRNRVENWFRT

SEQ ID NO: 5237 - protein, 282 aa, synthetic construct; identical to SEQ ID NO: 5236
  REGION 1..282: note = TnsF-Tn7 System Protein

SEQ ID NO: 5238 - protein, 371 aa, synthetic construct
  REGION 1..371: note = TnsF-Tn7 System Protein
MAKGVPQGSVSLVLAPDVSFLREDEAVFEAMVEGWKAQRIGGRGLKRASVEKTAAIVRRFQELTNEFPWRWSAQMFDEWMTDLVSARALAPTTIRSYQYAVRSFCAYLCSEHYGWVQECERRFGDHPTQICHEENTLKHLQDCEGRPGRRPLSRNEVQALLDRADSEVEARLDSGRKGALTAYRDATLLKVMYAWGLRDNEAAKLDITDFYRNPHAPQFGGYGMLHVRHGKSSAGGAPKRRSVVSMHDWAVEAIQDYIENVRPMAVKAKSSALWLTERGTRLGTKEIPDRFAYYRDEAGLDPDLTPHCLRLSYVTHLIENGVDPVFVQQQVGHAFQSTTAAYTAVSTDFKNRMLKDAISKVMLPSSRGDVQ

SEQ ID NO: 5239 - protein, 117 aa, synthetic construct
  REGION 1..117: note = TnsF-Tn7 System Protein
MKVIGYEWRLRQVMAEAGMFSTTKLIPELEARGIHLSASQVYRLAAEKPERLNLNVLAALMDIFGCSADDLVRSVDLGAGSARTTGTDAGAPEPSSGTLRASGLRPKRARILPAGDD

SEQ ID NO: 5240 - protein, 590 aa, synthetic construct
  REGION 1..590: note = TnsF-Tn7 System Protein
MSIENACLECGGPADSGSTVHGGRVCSLCWQALLRTATSQLCDWIIELSGVVGMHPVTVSRVVVTALTEPVDRLRVLFELKARGLGPSKRAGKRSERLVALVRALVQNGAPPRILGNISVSISSGFRGICSTCQEGRYIVGQKGEDLLCRACWPADKRVQKPCIRCAKPDRLSRDRLCRKCVGQDKIRTLFTTTRVNDLPALQVARDRLLTADGPYLHNMTKDRTWKVLCQLVTQEQDITHEALDALLRPGPGMLRSFLVSAGVLPTRNERLHSFEQWIQGTSAEISHAADRRAFTGFARWRHLRRARMQELSEAQIAGQRRELAQTRKLLNTLPSKGLSLQELDQKALDIWQSEGPFERWRVKPFLQWCRRNGACGPLVLYTPPAGPLPSVFRVPEADRTATLKRILDPHQDIPPGLRLAAGLVIIYGFRSHAIVRLTVKDIVDEAGGVWIRLGPDPLCLPEELEEYAREAIQKRNVTRFGGKTEDDHWLFPGPLQDSPIGPHALRQRLGGLGVKPDDYRSTALGQIAQQLPSPLLARLTGLNPLTALRWNSAVSASYARNLPMLDASAPKGLASAYAHADSQSPHTRE

SEQ ID NO: 5241 - protein, 448 aa, synthetic construct
  REGION 1..448: note = TnsF-Tn7 System Protein
MTRCQSLLRLTDQRCRSFERERLARLAKDRNAAAAAQHAAVLSSSRYADQVLASTVSAAQQRRTERDTKYWQLMREGKSNAHACRLLGMHRRTGTLLRRANNYQIPSLKPPPATTGRYLDARERLQIADLLELGHSMRGVARELGRQPSTIKRELDRHRDVEGRYLPRTADHDARLQRARPKAHKLVADPRLRKLVQRKLNRCWSPDEICGWMKRTYPDDQTLRLSPETIYRSLLLREGQGLHKRYATKLRTGRRIRKTRWRTRTGQGSRIRNMTMIDQRPAEVETRLEAGHWEGDLIVGVGSVSAMVTLRERKTQYGIIVNLPRDHTAASVNAAAISAFATLPPSLKRSLTWDQGVEMASHEALTQATGGPVFFAERSSPWQRGANENFNGLVRQYFPKGTNLAVHSDQHVDHVMREINTRPRKNLHYDTPAARFRAEHKVPNAVLR

SEQ ID NO: 5242 - protein, 181 aa, synthetic construct
  REGION 1..181: note = TnsF-Tn7 System Protein
MRIVVSGTHASGKSTLIADFCATHPKFAHLPDPFELLDDFHDQPDASSFLAQLAISAQRLEEIEPGTDVIAERGPLDFLAYLISWESLGGGRLPQEVLHQALALSNAAMQNVDLLVLLPLNSADQIWVHPEENLQLRADMNDTLLELSDDPDLLGSQARTVEIVGDRQTRLSALEATINQP

SEQ ID NO: 5243 - protein, 181 aa, synthetic construct; identical to SEQ ID NO: 5242
  REGION 1..181: note = TnsF-Tn7 System Protein

SEQ ID NO: 5244 - protein, 346 aa, synthetic construct
  REGION 1..346: note = TnsF-Tn7 System Protein
MLTAWKAQRLGGRNLRPKTVASGVQIVRRFRDSCGELPWEWSAALFDEWMEDLVAVRRLAPSTIRHYQNVTSQFCDFLCSPHYGWVEECERRFGTHPVQVCTEWNTTRHLQDYEGNPRRRPLTRAELQTFFDYADQQVGVRLDSGRKGTFSAYRDATLFKVAYAWGLRAAEVAGLDVTDFYRNPHAPEFGSYGMVLVRNGKASRGGAPKRRCVATLHGWAADAVGDYIENIWPLVRMESSNALWVTERGARMSPVQVSMKFAEYREELSMDPVLSPHALRHSYVTHLVEDGVDPLFIQRQVGHVFQSTTAIYTSVSGEFANTMMRKAIAGVMQAAAAPEPVSERHG

SEQ ID NO: 5245 - protein, 115 aa, synthetic construct
  REGION 1..115: note = TnsF-Tn7 System Protein
MDYEWRLREVMATRGLFSTTKLIPLLNERGVYLSSSQVYRLAAEKPERLNLKVLVALMDALNCSADDLIGKTEVPAAKDRKTGTGHEAPEPENGLEAPRDKGFRPKRAAILPSDR

SEQ ID NO: 5246 - protein, 349 aa, synthetic construct
  REGION 1..349: note = TnsF-Tn7 System Protein
MARLVHDMATHRTPICLRAVAKHPAGGATGYLAALLMESGVVPTENFDRIRLEVWQEEYFATLPNPANRSLLKQYAAWIVNPRFTEVAHLSTKDESLRHRGSKAHLIAVCDFLGTLDDLNLDLGTIPQRIFDDYVARHGRTGKQLTPFIRWARTRGMTHLHSEYLQSDLADSTASAATNDQRWAWVKELLAAEDIGLSARVAGLLAIIYGTALTRVVSLRCEAVTFDGDSTYLSLGTEPIKLPDAVGSLLRQLLDVAPTGFHDDNTWIFKGDRPGRHLTTAALRLPLTKRGINIRAAKNVALLNLARDLPPSVLADLLGISIAAAERWSTHSAHDWTDYPRVRLTTGPD

SEQ ID NO: 5247 - protein, 337 aa, synthetic construct
  REGION 1..337: note = TnsF-Tn7 System Protein
MLGSWEQQQRSRSLAEATVKSRTAVVRHFGEYAGSYPWQWQASDLDEYTSHMRSKRLAISTIRQRQGILQVFCNYLISPDYDWVEICQAQFGETPSQICLPWNTTKHVADYEGRPARRALTFDEIETLFHYADSRVEKAIRDGRKGALAALRDAQMFKTAYAFGLRRAELRGLDIHDLHANARVPQWGRYAAMHVRWGKSSKGSVPKRRTVLLVPELSWWIAGMEQWVDEGRALFGPGELPALWPTERKTRVSLEYIDRRFTALRREAGLDSALTLHCLRHSYVTHLIEYGYADRFVQEQVGHQHSSTTAIYTSVSGDYKNRILADALSRFNTLEAP

SEQ ID NO: 5248 - protein, 100 aa, synthetic construct
  REGION 1..100: note = TnsF-Tn7 System Protein
MADQGLFKTTELIPLLEEFGVSLSREQVYRLVTQTPERANLHFIGAVCAALHCTVSDLIEVRVVEEAAVVNAVEPSRGSIGNLRPIPARIHRPQQGPQNQ

SEQ ID NO: 5249 - protein, 292 aa, synthetic construct
  REGION 1..292: note = TnsF-Tn7 System Protein
MPGLRNPPRLLRLHVGPADESNGIPNGVTHQGVSGAGGRPSYEHAFRHGTCTQAALEQWVSAPEATYRDETGHFIRWSVQHRQARDLTFGTNRWTGPTSTIDSEKRWDDARRLLHNDSLPTQDRVAGLLLLLYAQKIATITQLTVDDVQLSEEAVTITFGTAPVVLPAPLTDLVRELVANRRGKAKIGTPDDIPWLFPGGRPGHPIADDRLRLRLRLRLQKIGLRPRQDRSTALFTLAAELPAAILARMLGVHIQVATQWQKASAGDWAAYAADVSQRATRRQQGEDVSAPR

SEQ ID NO: 5250 - protein, 625 aa, synthetic construct
  REGION 1..625: note = TnsF-Tn7 System Protein
MTASSSGSSCADVPQRVGVRGDARFEDIVNASWWQMAARLPLTLAAAARLGWAADRLAMFLLACCQLAVVVASAVALAALPGALAQLFDGGRVGGRVAAAAPALFVVAVAAGVRAGADALAVYASARLAPEVATKADLQILAAVPQVELEAYDTAGFADRLQAAGRGAEATESLIGDAQALVSALGQLIAAASVLALLHPVLLPLLVLAVVPKGAAAVTTARIQHRADHQNMADSHLRYLLRHYATHQRTAAEVRATTMAAFLADWYQEVTGRIRATHRRAAPRVLRVTLFGACISGLMLAATWAALGWLAAAGRMDLAFAATAVVAVRTSTGALTSLVLAAARLFRTSLYLEDWQTFLRRAASLRAVRGSRPIPAGAPAEIRAEHISYTYPGAVRPAVDDVSLTLRRGELTALVGENGSGKTTLSSLLTGLRIASSGTVSWDGTDLAEADPHSVWSKVGLVPQDYTRWPMDLRANIHLGQPRSESDALLLDAARAAGADSVIANVPHGLDTLVAGSHWGGTDLSGGQWQRIAVARAFYRDAAMLMLDEPTSAMDPRAEYLVIRRFKELAAGKTAVFVTQGLENARIADRIVVLDRGRVREEGDFETLMALGGLFAELYRLAQDR

SEQ ID NO: 5251 - protein, 625 aa, synthetic construct; identical to SEQ ID NO: 5250
  REGION 1..625: note = TnsF-Tn7 System Protein

SEQ ID NO: 5252 - protein, 242 aa, synthetic construct
  REGION 1..242: note = TnsF-Tn7 System Protein
MEFIAWVEMEDFDLGSLTQGDLDLWVTSHRTRRIGAFIRWTVARRLTGKLTAVPQHSGLPTKFLSSEEHHEQLRRCLNDDELPLEVRIAGALTRLYGLPTVRILQLTTDRFHHEEDGAYLTIDQNPVLLPPKLARLIEQQATRPIGHISILDQPTGDHPKYLLPGRPPSRPRSAAGLHSLMRQHGLPGLSARNTAMIEAVADLPPIVASDLFGIHPQTAHRWARFAQDSWTDYLAARAATEK

SEQ ID NO: 5253 - protein, 413 aa, synthetic construct
  REGION 1..413: note = TnsF-Tn7 System Protein
MEDWAEIRRLHRAEQMPVRAIARKLGIARNTVRRAIADDAPPKYQRAPKGSIVDAVEPQIRELLEQWPEMSATVIAERIGWDRGLTVLKDRVRDLRPVYRPADPASRTVYEPGEIGQCDLWFPPADIPLGFGQVGRPPVLVMVAGYSRWITARMLPSRSAADLIAGHWRLLTELGAVPRVLVWDNEGAVGSWRSGGPRLTDDFAAFAGLLGVKFLLCKPRDPEAKGLVERANGYLETSFLPGRVFTSPADFNIQLADWLTRANRRIHRTLQARPTDRLEADRSRMLALPPVAPPGWWKASLRLPRDHYVRLDTCDYSVHPLAVGRRVEVAADLDQVLVTCDGVEVARHARSWARHQTITDPDHAAAAAAAREAATGPKPAPVDMAEVEERSLETYDRIFGVIDGGLSTGEGAA

SEQ ID NO: 5254 - protein, 368 aa, synthetic construct
  REGION 1..368: note = TnsF-Tn7 System Protein
MSTHALGSAKLVLAQNVVHIDPAPAVFEAMKEGWARQQSARFLRAASITPRLRLIERFGEFTGQYPWQWTPAEGEAFIAHLRGGAKPIQMSTARTYEVTIGLFIEYLMDSRYGWTEVCGERFGEGPQAVFHEGNSVLHTIEYEGDPRRRPLDYDEVQALFDAADARPAKIRGQGRKGVLAALRDAAVLKTIYAYGTRRTESSRVDLVDFRRNRKAPRFGNYGSLMVRFGKASKGAPAKRRTVLTVPEMDWVVGVLQEWLSEIRPHFAPGRHPALWVTERVGRLSPRSINEAFVNARQAAGLDEDLDLHCLRHSYITHLTEFGYPARFVQEQVGHSHASTTAIYMGVSNEYRNKLLEASMKARLGEDWE

SEQ ID NO: 5255 - protein, 385 aa, synthetic construct
  REGION 1..385: note = TnsF-Tn7 System Protein
MILTQAKAWSPVVAREMATYLEEHPDALTAPSSHCPAALPRLLRQLDLHGYGLNVTQLACPRCGRTDKPLVRPTPEGRCCGWCGHRTELRPCARCGKDGNIVTHREEGPICRACYRRDPARKTKCAKCGQLREPARRENGKIVCGPCAPKLEHECSRCGRMAPSAVAGDEPICRSCYTRPPRLCGVCGEVQPMAKRAADGQPDTCMSCYRSPLGECSVCGRQRPVQRRRGPGGARYCDSCRPRSMTTCVDCDRRRPLKATWPVGALCDTCYRRRTRSPAPCTGCGTLRVLVGRSEQGHDLCGPCSGTEIDYACRRCGFPGNIYADGCCGRCINSDRVHDFLSDEDGNLVPHLAPLADKLTAAEPWAVRNWLATSKGVQVLARLAS

SEQ ID NO: 5256 - protein, 153 aa, synthetic construct
  REGION 1..153: note = TnsF-Tn7 System Protein
MIFLGPPGTGKTHLATGLGIRACQAGHRVAFGTAAQWVTRLAEAHQAGRLSDELTRLGRIPLIVVDEVGYIPFEPEAANLFFQFISGRYERASVIVTSNKPFGRWGEVFGDDTVAAAMIDRLVHHAEVISLKGDSYRMRGRDLGRVPAANSGE

SEQ ID NO: 5257 - protein, 153 aa, synthetic construct; identical to SEQ ID NO: 5256
  REGION 1..153: note = TnsF-Tn7 System Protein

SEQ ID NO: 5258 - protein, 108 aa, synthetic construct
  REGION 1..108: note = TnsF-Tn7 System Protein
MIKKMGYQWKLRQLMAEREMFQTSDLVPLLAERGVTLSREQVYRLVTQPPQRMSMDTLVALCDILECTPNDLIKPEAVNAQVNKTSDGTLGPVPAAPRRAVVRRPGQS

SEQ ID NO: 5259 - protein, 636 aa, synthetic construct; identical to SEQ ID NO: 440
  REGION 1..636: note = TnsF-Tn7 System Protein

SEQ ID NO: 5260 - protein, 1554 aa, synthetic construct; identical to SEQ ID NO: 437
  REGION 1..1554: note = TnsF-Tn7 System Protein

SEQ ID NO: 5261 - protein, 1554 aa, synthetic construct; identical to SEQ ID NO: 437
  REGION 1..1554: note = TnsF-Tn7 System Protein

SEQ ID NO: 5262 - protein, 83 aa, synthetic construct
  REGION 1..83: note = TnsF-Tn7 System Protein
MFFVYILKCIDGSYYTGYTSDINKRLHQHKSGYGCTYTKTRTPVELVYSEELPDKPSALKREKQIKKLDTYKKEQLIEKSRIE

SEQ ID NO: 5263 - protein, 636 aa, synthetic construct; identical to SEQ ID NO: 440
  REGION 1..636: note = TnsF-Tn7 System Protein

SEQ ID NO: 5264 - protein, 375 aa, synthetic construct; identical to SEQ ID NO: 441
  REGION 1..375: note = TnsF-Tn7 System Protein

SEQ ID NO: 5265 - protein, 545 aa, synthetic construct
  REGION 1..545: note = TnsF-Tn7 System Protein
MGKKQRDCVACGGPVGYLDRQHCCRCWRRMKGEAAKAPCPSCGLDRVLQNDTGRCITCSRVCRECGHPVRSPKNQLCRECRRKAGQLAGQRICPRCGKLGYLRETTGWCGHCSRPRPEKKPPRICRECGQLRRHAGLGLCSACWQKHPGRPFIRGEHLRERLTDPPRWLGDFVAEVAAGHCVARACGFITDLGRLLEDEHSNSPQALLERSRRPGRSMGSFARALEDFFTLRGLALPTDQAERLAAGRRHRRVEAVPEPLRQAVAAFDVFRMRAQDRARRAGTRPRTNHTLETALATLRDLAVFLINERVKDGWSLVDVHDIEAFLAVLPRARKRRLTVLRQFFRFARAQKLLLVDPTRGLAAKEASGFRGQTLTLDQQRELFRRWTAEDLVHPHEALVGMLALLHGASSSEVRLLQITDVDRLAQSIRLGKRPHPVPLDPASWTVLQRCLDHRNGWPTENPHVMVTKGTKAGRSPASTAYLSHVLDDCGFPPRMIRSTRLLDLVNTMDPKLVAAAFGMDPQATLIYLSDRIDETRLSQWETERG

SEQ ID NO: 5266 - protein, 336 aa, synthetic construct
  REGION 1..336: note = TnsF-Tn7 System Protein
MTTDPWQFQTACVDAFVASWRARGFSPVTIDNDIGQLERTLKALGRPAWEVTPEDVDRVVGDLAVQGRKTSTRREYVQIFKGFHRFLQARKAPEIEAAFGVRLVCPIDEFNASRHVGDDSPALLPPPTPERVNEFFDFMKQRIATARKYGPAARDYAMFRTLYHAGLRSEEASLLEKPDLHFTRGPFGKLHVRFGKGAHTSGPRPRWVPMLDGLDLVLRLFLEDVRPKFPDSPVLFADESGGSLHRGTIRNRLRCLMELEGRPPADRFSPHALRRACATHNYERGVDLAAIQQMLGHWTVSSTMRYVRPSATFIEDAYQRAVASTLAELTGKDIKG

SEQ ID NO: 5267 - protein, 104 aa, synthetic construct
  REGION 1..104: note = TnsF-Tn7 System Protein
MKIQWRLRMAAAQREVWTGTELRRLLAEKAGLELSSASVSALFTKEPSQVKMTTLAALCTALECTPNDLIEVDTTPVERPIAPPRPVADLPQAASARGRSMPPL

SEQ ID NO: 5268 - protein, 178 aa, synthetic construct
  REGION 1..178: note = TnsF-Tn7 System Protein
MALGDAPVTDLSQRHIASMLRARPGHRAALQGFLSFVAAEGGPRLTIAKPRQDPIAQEQRLRADIRACRKRLKSPRTVAEARALIASLIAKVYAIPLTRVLNLRRAEIAPGPTLWPDAEAIRLAEPLASAVSRWMVSTGDFAFPGRHGHQPLSETAVRYQLSLKSHLLDRRPVRLSSL

SEQ ID NO: 5269 - protein, 90 aa, synthetic construct
  REGION 1..90: note = TnsF-Tn7 System Protein
MRYTCAIMDQLQVRMLMIDELHNITRLPPRAQRDRILLLKSLSNCLCLPIVAAGTRDAEAALRYNEQTANRFEPFKLQRWRLPDLRDAAS

SEQ ID NO: 5270 - protein, 266 aa, synthetic construct
  REGION 1..266: note = TnsF-Tn7 System Protein
MLTAAGALAPRDEELTRTGQWLDDILHTVEPDTARRQLRGYATWQVMRRLRVSAARAARPRSYTGHARRNIRAAAEFLAWLHARDRALTQCTQADADAWLATGPAAGQVRDFLTWATHHGHCSALTISGPTPNTGTATSPDQRWTLTARLLHDETLDPTDRPPAACCCSTDNSCPGSPPRPPTKSPPVTAPSTSDSANTTSPSPNRSARSSPSWPATAAPTPEPDHQPKPTGCSPADCPENPSPQADSVNASAPWASVLKPDAAQP

SEQ ID NO: 5271 - protein, 161 aa, synthetic construct
  REGION 1..161: note = TnsF-Tn7 System Protein
MLDVNDFAVNPAVPELGSRGVCHVRYGKAMKGSPPRRRAVATVMPWAAEALEQYVCEVRPRYGAGEHPALWLTERGARISVRQVDDRFGQLRNLAGLPADLSVHCLRHSYISHLIEDGADPLFVQWQAGHSWASTTAVYTTVGQDARNRMLRRALARAYQS

SEQ ID NO: 5272 - protein, 187 aa, synthetic construct
  REGION 1..187: note = TnsF-Tn7 System Protein
MGGLGGGRRGGLVLVAADGDVSVSPGRELFEAMLAGWRRQQQARRLSGPLIDGRERIVRRFVAFTGCWPWQWSSAQAESWLASGGWVHSTIRAYQGALGLFLDYVCDPRYGWVAECEQRAGAVPAQVIGEHNSTTHAAAYEGRPERRPLTRTELQAFFDAADDLVERASCSRRKGSWRPFETPRCSR

SEQ ID NO: 5273 - protein, 106 aa, synthetic construct
  REGION 1..106: note = TnsF-Tn7 System Protein
MARKKIGYRWHLRRLMADRDMYATTDLRPLLADRGVVLSREQVYRLVTRVPERLSLQTLAALCDILDCQPGDLVEPVAATTKRATPPESVPLPRPRRARVAPDAGT

SEQ ID NO: 5274 - protein, 287 aa, synthetic construct
  REGION 1..287: note = TnsF-Tn7 System Protein
MNQVVFAREWMPRLYSEFANWLHYRQGDAPTCLKTFRAHQPFFERLDAEYSALTDITPESLLVRCSSAYLRRHLLATQFLQEALGFTIKPEQKAHYGEMETVRLKLLESKKEPWGSLLVNYVNSLNDAQLPIRTIRLYLSAAHAFCVHAKATEKGWESRAPLKFLKANPGARNNLSRFISHCARTYGWDVALPTRKQLPGKRAIVPKTVMELRTLLQKVQKTGEANASKHDLARILAKSLGLSVGDVMALSAEHFQQTANQFNLLVAQEVICLPKELHAIAQRFLLK

SEQ ID NO: 5275 - protein, 1136 aa, synthetic construct
  REGION 1..1136: note = TnsF-Tn7 System Protein
MKYLSKVHLVQFSFFEATTIETNGDLAILGANGAGKSSFLDAVQIVLLGANKRNLAFNAQSVSATNRRTIRDYCLGTMRSEESQSKALMRKRDYANSYITLVFYDDKDGSVMSAGVCLYASATEPDHRVIGLYLLPGVELTLEDHLSKAGTEENSVDWDVFEAAIKRLSKIQGRTACITVHSDEYLDELLHALQPKARHIDKRAFSRAMRKSLQLKEIESVSDFMRDHLVDVQKIDKQAARISLQKLTGIKELIATVKAQIVQLKDIDSLYKKLELQCKRRDSAKATRLQILFESKDKAISENSLRVEQLQEEIAQLQKELPENDLEIEENRAQLEELTKTIARDPENGKTEHARQLFSEYQASLKIRQQNIDALVLHLRTALASCVQAVGVFQEDVASNLGALSEFWEHQALHGVVPTLDDVSNLLKQLRAMKPHLDQHASHLHLQLKELEQRRNALISRLNAAKQGMKLSEFDHTGLAMERLTQRGIDAKPVSSMVRICTPSWQGAIEGYLAHRRAAICVTPGRELDAVRILKEPPHEIYDVTVVQPNDLHEDSNPHAAANGVSSLIEGDDTLAVAYVRGLIGSMRLASNHAELENSDCALSADGMVREHGGIRRFKTLSKDDWLFGMTANAEDVSSLTAEHSKYHHEIEKIRSEVRLLNQAQEDILLVLKSCTEEHFDSAKRELEEYQTKLSMVADPATVELPERLVQLTEKKKALEQQRKDLEKQSRKLLAKLQTASDAERQLQTEIAKQVDELRKLQDDLSLATQAENYDPDSTAQTYQKAVALLRQEDAEAMLKWLAREVDDASTKSSTFHADAKVAFIKFIDEFSIGLIEERSDWNKAAAWVSFRIHELEESTLVAYEAQAEAAQRTAEEAFRNDVALRMREAIKSLENEITELNKILKACPAFSGNERYEFISTPSSTHIAIYDLIMDSAGWTDQNGSFFGSEDGPGKLITQWLEATVSGQSGKDNPLEDYRLLFNFDLRIMKDGEVVDYLSKRVGVGSNGEHRVPFYVIAGAALASSYRIKAGVAHDGAAVMLLDEAFYGMDAQNTLAAAEALSKLGLQLIMAAPDADRGKLIPVCDSIYDMIRFGPDAFGDVTHLKEPAKIIMKSDMLALHPDLLEETMSAIQANS

SEQ ID NO: 5276 - protein, 1136 aa, synthetic construct; identical to SEQ ID NO: 5275
  REGION 1..1136: note = TnsF-Tn7 System Protein

SEQ ID NO: 5277 - protein, 633 aa, synthetic construct
  REGION 1..633: note = TnsF-Tn7 System Protein
MAKIDDFPKDGKLWVIKWVDEFRMPHRTPDSTAVSVLLQELPFTEQARLSTLKAHEVQAIWGKKFTAPPLTFYRTVHGKCPTVHAGSMPLLSVGLVYQDQELVGELPASMATIALPEVEVSCGELDLQTDVPAPPGWPEGRKHKLLNEFEFAGPRREFGRSRCLVFQDNDIDYIIPRAVIFKRFYAPHSDMAKVFTNGPWPEQYPELIFTGTTKSGHTTGIDADTGDWHLVLMPRIADDYLFLLATYYFDPYGQVCAESIYSNAVRDRGANPLASWYASAKIPFQASDASLRLDLKGYFLKPYGSAKGTSVRRKFLVTTIRGCSLPTYLGNIVKGRVNSGDTGTEIVESDDPAPYSTTRPNKPAGSETTVESGFNADARTPARELPADEFSWIDPPEIKKLQKDVSTRYQPAKKPRPPEKDTDRTSLGNKDYKGSSLTSATAGLRQREPSKRLESLMGALAALQQRKVVTSFSLFDPPKDSWSAWRASRRCWNFLSLDSRTNGVWPKRSWRLIEPAITEDGKYFNGKARAALVLRVTTPKFSGYWIEIEVKAGGYYSPFLYNFSGDDATALIFNAIETIAVKRGSNLAAPLQKVLAQQGGGSVGLYRHNPEKNNDGGFDLDRLTLFLKDPQHP

SEQ ID NO: 5278 - protein, 227 aa, synthetic construct
  REGION 1..227: note = TnsF-Tn7 System Protein
MDSCEITRLVSNGPVRKLRTSRRCLTGKVAQSNQENAGFESSLERDWLVALDFDPSARVIRVQPFSIYYEISGETRRYTPDVLVEYITPNGSVKTIVYEVKPQEELRDAWQNYHARFKAAVKFCRANGWRFKIVTEQHIRTPFVENAQFLRRYRNLKPQPLFAEQLLYTLRAVGETTPQALLAAAYLDEQKKMAALPELWRMVATRMIGTFLDKPLTMQTPLWLIKE

SEQ ID NO: 5279 - protein, 362 aa, synthetic construct
  REGION 1..362: note = TnsF-Tn7 System Protein
MKPLQRAWPFTPQPVKGELLSSYLARIAHAHGMKPYSFYAFHFPGVPIWNRDIDLSIQSGLLEKISACSGQSQATLQAMTLQAWRLQLNFSAHAKQAAGISPWVNALGIFHRTRKRYGMQYCAVCLHETSAFLKIWRLAFVTVCPIHRIALHDSCTQCGAPVAFHRTERFMASCHVCGRSLALPSIAVGDHTLTKRLAFQKTLLHILNGGTVFIAGVPLSAPRFFKAATLLLHTMKDKIRAHSRTLRLPADLQNCPTGQIELARNHVRARQCLLLWHCMKDWPLRFLHTFNAPPVAQGLTSQAADPLALIAMVLGQTRRRQKNRQTAKTSPVRKQLRQLHRTKHPGWRTRRAECLLKAAKSA

SEQ ID NO: 5280 - protein, 638 aa, synthetic construct
  REGION 1..638: note = TnsF-Tn7 System Protein
MAGISKAFFKAEPGQIVQSEGRVCKITHLISVDSVLAEDIKTNETVRLHVDSLKAYATSEVETDSALTKGMIDLALYSEEEWAEAQRRFQAIKPLLENPIRTRGDAEAIARKKNIHVATLYKWLKTYQEAGHVSALVPTKRGKKTGTTHLSTEQEKIIESVIDDLYLNKQRHKAQDVIEEVKRRSRLAKLASPHANTIRNRIAMLGPAETLRRRGFKSAARDNYAPHRGKFPGADFPLAVVQIDHTEADVILVDEEHRKPIGRPWLTLAIDVYSRMVVGVYITFEKPSATSVGMCLANAICPKREYIAELGIGGVWPVWGVMSIIHADNAKEFRGAVLERGCKEYGIDLQWRPVQLPHYGGHIERLMGTMANEIRKLPGATFSNPAQRKGYNSEANAALTIKEFEAYIVDFIVNIYHQRKHSELGMPPRSQWAIGVLGNEKSAGTGVMPIPEDPLRIRLDFMPYFMRSVQQYGIQIDNICYYDPVLEPYINSVDPNNPKAKREFLVRRDPRDISKVYFFDPADNRYIPLHYGNIGRPAMSLWELKEVQKMLSAEGKRNVDENMIFEALGRMRERIEDAKQKTKSARRQATRIPKPSKAPVPASTATFTARAVEKDDYLVDDDPFAQPIEPFDDVSVAR

SEQ ID NO: 5281 - protein, 295 aa, synthetic construct
  REGION 1..295: note = TnsF-Tn7 System Protein
MTTFKHLAPEVAEALTLPKPERIQFCNEDRWVGYTRAVQIIKQLDDLLTYPKTLRLPNVVIVGRGGNGISSFLVRFAHRHPILISATGSPLAPVLRVELPETPDESEFWSDILWALGVSHREKESPAIKKRQAKRVLQYADVRILVIDEFNNLTNAGKKAGDLLAAIKGLSNDLKIPIVAAGTQAAISALNSDPQMKSRFEPAALDRWKLDAEYLRFLASYERLLPLAEPSQLASRDMARMIYGMTGEALGETVKLLKKAACHAVESGVECINEKVLKSVPWTVPGNWEDTGRRI

SEQ ID NO: 5282 - protein, 295 aa, synthetic construct; identical to SEQ ID NO: 5281
  REGION 1..295: note = TnsF-Tn7 System Protein

SEQ ID NO: 5283 - protein, 466 aa, synthetic construct
  REGION 1..466: note = TnsF-Tn7 System Protein
MMLPTGPICYRCRRDIAYHPTVCPECFEMRPIAFPSTSSYGTLVCAACAGEESVFACAQCGREDHPYGSDRCARCILAGRLTELFTDPATGLIHERLRPVFDELAAAPRPQSVITWLKKPPATGASLLGQMARGRTPISHDTFRELPADRSHNYLRDLLASTGVLPPYHAPIEQMERWLGDKLAPLGADDAGLIGRYARWHLLRNLRRVAERSGLTKSAIYSARSHVNGAIRLSQWATARGITISGLTQTQLEAYLDEHPGGRNGQQGFVAWLGRTRANARITIPARESTLPEVIVADTDRWEQIDRLLHEEQIALYARIGGLFTLLFAQPLETIVAMRTEQIVIDDGRVMVCFDTVPVEMPPGLDDLIRRHLARPSSPSIVSTDHGWLFPGRHPGRHMVRENFRAKLVTSGIRPGQSRHAAMFALAGNIPAPVLADLVGIADTTAIRWAALAARDWSSYIAMRSD

SEQ ID NO: 5284 - protein, 466 aa, synthetic construct; identical to SEQ ID NO: 5283
  REGION 1..466: note = TnsF-Tn7 System Protein

SEQ ID NO: 5285 - protein, 578 aa, synthetic construct
  REGION 1..578: note = TnsF-Tn7 System Protein
MTAHKSGHPATPLTIWRLARERPFILVVALLLVLGGAGLSLVQPMIVGRTIEMVERGDTVVPLIAILVALAVVQIASETYGGYLQQTMGERGSRRARIGMGQAVLRSALTPLSRHRGGDLVSRFTTDADAIRDGVARGYIQVVTATVTAVGAGTMLWLLDSVLFLIVAVIMILAGAGAWVFLQRIEAASAARQETLGTIGATVDRALVGMRTIRVFHATEGERNRLNRSFDHGFETGKKYATWTAAVTPAVELAATGSFLALLLGGGMRVAADQISLATLVSALLYSTILVVPIGALIEATISLSTAKGALARINEVITLPDESTGHELREDAPPARPLETPAALKTLNEASGLHISGLSAQYDTAPPVLNNVSLSIPRGHSLLIRGPSGSGKTTLVNVICRFLQPQAGRIVLDGHHLLRMPPDEARRHVAIAEQDAPLLAGTVREALAYGDIHTTDAQMLTVLTELGLLADLGGPSHALDREIGEHGKGLSGGQRQRLSLARAVLANRPLLIVDEPTTGLDESNRRRVVSSLQQRKSDQTLLIISHNDEDQAWVDQIIDLTSEIPALNDSTRTRDSG

SEQ ID NO: 5286 - protein, 578 aa, synthetic construct; identical to SEQ ID NO: 5285
  REGION 1..578: note = TnsF-Tn7 System Protein

SEQ ID NO: 5287 - protein, 235 aa, synthetic construct
  REGION 1..235: note = TnsF-Tn7 System Protein
MLTFEQLTKTRGSRDILTDITFHARPGRVTGFLGPNGAGKSSTLRILLGLDRPTSGQALVDGQRFASLRDPLRSIGALLDGSGAHRSRTGRAHLRWVARSAGVDNKRVEEVLELVGIADAGSKRVATYSLGMGRRLGLAAALLADPAALVLDEPINGLDPEGIRWIRTFLREQAQAGRTVLLSSHLMGELAETVDDVVVIRDGRIVANGTLVEVTGDHKNLEDAFFSLTGDRDQR

SEQ ID NO: 5288 - protein, 235 aa, synthetic construct; identical to SEQ ID NO: 5287
  REGION 1..235: note = TnsF-Tn7 System Protein

SEQ ID NO: 5289 - protein, 372 aa, synthetic construct
  REGION 1..372: note = TnsF-Tn7 System Protein
MAGEFPGSARLLLVPGVVHLNEPAAAFEAMVTGWSRQQRSRQLGEVTVRSRERLIRRFQEFCEAYPWQWTPADVEDFTVSLTSGTDRLALSTIRGYHLTLRMFCDYVTDSRYEWPTQCHDRFGQVPSQVCNEWNTVAHLNDYEGRPQRRPLTYRELETLFDWLDDRVDRIARSGRKGALAGLRDATMLKTTYAFGLRRNEVARLDVADLRPNPHMRDWGSYGSVHVRYGKATAGSLPRRRTVLAVPEFDWAVDGLRQWVEEALPLYETGGHPALWLTERRTRVKVRQIDDLFATARAEIGLDEHLSLHCLRHSYVTHLIEHGYPERFVTEQVGHTYASTTAIYTSVSNDFKNKTLQAALSRVYATDEKERTL

SEQ ID NO: 5290 - protein, 112 aa, synthetic construct
  REGION 1..112: note = TnsF-Tn7 System Protein
MRTVQVQWNLRQVMADRGLFQTSELLPLLEERGIRLTREHVYRLVTKTPQRLNTEVLVALCDALGCSPADLITPVVAEQKQAKTGTTGEGGPKIGELRPVRARVRRPDGVDE

SEQ ID NO: 5291 - protein, 425 aa, synthetic construct
  REGION 1..425: note = TnsF-Tn7 System Protein
MCAGCAGEVSVYACAECGREDDHYGVNRCARCIVTERLTGMLTDPTTGRIHVRLQPLYDELVVARRAQSVITWLQKPPGTAARLLPRMASGQMPISHEAFRSLPADRSHNYLHHLLTATGVLPAHDVPIELMARWLEDKLADLGSDEAALIGRYARWHVLGYLRDAAGRGQLSMGGVYAARSKVNAAIRLALWADARGLTLAALTQGQLEEYLVEHPGAGTALQGFLGWLRRTRTNPHVRIPWPESTTPDVLVSDADRWKQIDQLLHDETIILYARIGGLFALLFAQPLATIITMRADQVTITDDGRVLVAFDTLPIEMPPGLDELLRRHLSRPGAASIASSEHGWLFPGRNPGHHLVREGFRLNLVAHGIRPGRSRHAAMFALAAEVPAPVLAELIGVADKTAAKWAALAARDWRSYLNNRADT

SEQ ID NO: 5292 - protein, 425 aa, synthetic construct; identical to SEQ ID NO: 5291
  REGION 1..425: note = TnsF-Tn7 System Protein

SEQ ID NO: 5293 - protein, 1148 aa, synthetic construct
  REGION 1..1148: note = TnsF-Tn7 System Protein
MRVMSAGEGYRYLLRTVVAGDGVRSMATPLTRYYQAKGTPPGRWMGDGVRGLGGGQLAAGDEVTEEQIQLLIGHGRDPVTGDPLGRAFPQYEGSKRAVAGFDFTFSVPKSASVLWGVADAATQEIIVRAHHYAVEQVIAFMEREVAATRTGVAAGDGAVAQVDVAGLIATAFDHFDSRAGDPHLHTHVVVSNKVQTVLDGKWRSLDGRPLHGAVVALSELHEVLFMDALTRALCVEWEPRERGRDRNQAWAIAAVPEQLVTEFSTRSRHIDVATDRLIAEYAYAHGHRPSRGTIMKLRAQATLSTRPEKHVRSLADLNHGWRERATRVLRQDATKWARIASADVAPPVLHAEDIPLDVIATIGAQVLHAVSEKRATWRHWNLVAEAARQTMQYRFATASEREAIIGLVVDAAERGSLRITPPELGSSPAAFQRDDGTSVFRPKHSIVYTSDALIEAEARLRERATDVSGATIASSTLHDVARRRLPGGGTLGDDQTGALQSIIESGRVVDVLVGPAGAGKSTVMGVLRRAWEAEHGRGSVIGLAPSAAAAHVLAEDLGIATENLAMWWQNHVAHSDAFRANQLVIVDEASLAGTLALDRVSALAAAAGAKVLLVGDYAQLQSVDAGGAFAMLVHDRPDAPELVDVHRFVHDWEKAASLSLRRGDEASVDRYFAHDRVREGDTEEMADAAYLAWRADARAGRVSVLISDSNEAVAALNERARTDSILDGRVDALHEVTLHDGTRTAAGDTIITRRNDRRLRAGRAWVRNGDRWTVLAVHRNGALDVRRQGRRWGTSTFLPAGYVAEHVELGYAVTAHRAQGLTTDTAHVVVARGMTRENLYVAMTRGRDANTAYVALDRPDVAHTGIRPRDDADASAQSVLVGVLHHVGAELSAHEMIAAEQETWGSIAQLAAEYETIAAAAQRDHWVALVRASGLTGDQADSVIDSEAFGSLGAELRRAESLRVDVERLLTRVIGQRGFEGAADIAAVLRARVARAIVQDAAAGRNGRTPRLVAGLLPIAGGPMDAASRRALRERADLIEARATALVEQAGGARESWLRALGAPPIGSAGESWRRHAATVAAYRDRYGIVGGRPLGIGQPTSDAQNADATRARAALETARRIADRENDQTRGHVPIVNTGLSGFGLRV

SEQ ID NO: 5294 - protein, 1148 aa, synthetic construct; identical to SEQ ID NO: 5293
  REGION 1..1148: note = TnsF-Tn7 System Protein

SEQ ID NO: 5295 - protein, 1317 aa, synthetic construct
  REGION 1..1317: note = TnsF-Tn7 System Protein
MTPLSDPDQGIPAGRDSDLLPTPSLSPDEFEDFTERLLSAHRHVVPPARHVVRVERWGRRGDKQDGIDFEGTWSDGQSAAWQCKRLDALTVPDVQKFIKACTFTADEFFIVYSGEASHDARDEVKKHPGWELLDRRGLGRMLGDLPLHLQRSVLDATWGPVTRRQYLETPGEDSFLGVQTVLDRRLDSGALLNDLGAKAGRVPETAAIDQALDRTTDWPLVVLVSGRGGAGKTRLLAERMAKFQHENPRIPVLWLAPGRSIDGDALKELPYAPAVIVVDDAHRLTEQLRPLIEYANQQPGTQLILGSRGPGISTIRAQLVEAGLRDRQVEAIPIGELTSSEARALVDSVLQDMNATFELRDFLAGQARRSPFLAVLTANLLRAGELTGPLNLDAGLREQVMVRYRDVVTDGIASESQPAVRKMLASIAALGTVDLSDTQFRTQLSALSGIPPVELLRVIEKLRGHDVLIGPPNATQFAVEMLGDQLLEAEAIIGGVDSGFTLELWNAFKASHRTAVLSGLGSLAWRLGENGRSLIATVWSEMEAEVAASDLDGLHWLIGSLRGVAYAQPAEIVHLSARLVDRLNELDNAPQDPPDANTEETESFWLRPATRRDVERALAPVIADTAVYNADVLEQVLDILWRIAQHDQRAPAQHSDHPFKLIEDRLANLGDLPDLSYPERIADAVHRWVADYDHRQGTLSPLPPLASLLTKEGTTTEWSDRRTLRFKPFFVSPDWARPVRDQIRSTLVDAATDDSPFAFEAIRMLGAALRPPMGMFGATVPLTTERGWDEDDLATLDAFAVIVTRTSRPAIRRLIRRQIEWEGMYSRSAMVRRAALVLITELDERPEDDLSDYLSHPGVDVGLPSRRGISVPSIGELETLIESGAENADDFDAKYAAAQTAMIEALTAVIEDLWPGEDVIDGVRRLDAEARDVSANGTAVWEQLHTVFAQLLSDRPTFAGELFQAIPDLPPGPLDDTLPQLLEGLRVADEPALKALIHSYLDANSRVRAALGRAASRYNWLSRGPSYTELTRQGREDEDPTVRNTFMTTVRLDLDPVEGARLLIDGEADEATIRAVIRATAHHAAAGWSVRLRDEEVKGVLSVVGRVHGSSTASGILAELATAHPYATLQHLAEKAVSGTARQERDQRVAHALQGQAAEVARWIVDISVDANARRVVRRVRPPLPAAPGAELAAELSSIVTPADATTVVNVAATLTGFNGWAPFAPGLARLLLEHPDLNPAECEKVLGSLKVQLTPGLVSGIGGQSPELNAALEAAREAEAAEPNATLKQLFAQSVRALEHRIEEFATPDDDEDGFP

SEQ ID NO: 5296 - protein, 1317 aa, synthetic construct; identical to SEQ ID NO: 5295
  REGION 1..1317: note = TnsF-Tn7 System Protein

SEQ ID NO: 5297 - protein, 345 aa, synthetic construct
  REGION 1..345: note = TnsF-Tn7 System Protein
MFEGMLTGWERQQKSRLLSPSTIGPRIALLRRFAEFAGTFPWQWDAGDVEDFTVALMSGAGRLAPSTIRSYHLTLRMFCDYLLDGRYGWVAQCEQRFGSVPAQICHDYNTVAHLNEYEGRPGRRPFTYDELQHLFDFLDARVGQVRRSGRKGAWAALRDAQMVKTCYAFGLRRRELCMLDVADLRPNSQVPRWGTYGAVHVRYGKSVRGGTPRRRTVLTVPEFDWVVDGLRQWVEQARPLLQPAAGHAALWLTERRGRVSVKAMEQRFAWLREQAGLDAALSMHCLRHSYVTHLIEFGYPERFVTEQVGHSYAATTAIYTSVSNDFKTKTLTAALTRVYRTEEKQ

SEQ ID NO: 5298 - protein, 112 aa, synthetic construct
  REGION 1..112: note = TnsF-Tn7 System Protein
MTRKLSMRWHLRQLMAAMGMFQTTDLMGPLHERGIELSRQMVHRVVTKTPQRINTDLLAALCDILECTPADLLELHVEEQRQAPAVGNGGGPGIGDLRPIRAQVRRPDSHDT

SEQ ID NO: 5299 - protein, 346 aa, synthetic construct
  REGION 1..346: note = TnsF-Tn7 System Protein
MAAEFSPEELRRYQVAYAWLLREGQAEAMPMEVVARTTENLAQDRLLARVREPWQLELLTRYRRSLAAYLRSWRARGWGGAHERFTARTVTLSLRAAFRLLDSMPSSVVSAQGIDRPMLERFVASYPGHRNALHSFIGFLNRKERMFQRLHLDRSVPSGVPFHDLLTPQRAGQLRQGWFRAEDGDLRNALLGVLMLLYARTGKQARNLCRGAFQTTADGSVQARFAEVSIDLDARTSVLLTRYLATLEARRGQPLKDNDLLFESAVPGRALSDAGLRYVLLGQGVTARQLYTTALASFFRAGLATPKVLVRTLGISNQTAVKYWAAFAPRIRDEVAQAGRSQATST

SEQ ID NO: 5300 - protein, 321 aa, synthetic construct
  REGION 1..321: note = TnsF-Tn7 System Protein
MKTIKGDENLVLLFLNHARALPGQLRPEHFERWSNHLYLERGVVASSQRTYQTAVRVFFDYLLREPRFKADIRQTLGVELVQVSTPENSIIHRRERELERNNSRRSFTEAEAATFLERIDLEMALAYQQGSKGVRAHQRNKAMFGSTLEMGLRADEVLGLDTDSFEPNPEQPAMGDFGIVRVFGKGSKWRQVPILKVALSHALAWYMEHVRPNYLAKAAPGEKAMFLSEQGKRLSYSAFHREFRRIIELAGLPIELVPHCLRHTSMSSDDMSGLSLESNRQRHGHAHGSTMQVYIHHPDAYIRGAFNAAIARNLKADGATE

SEQ ID NO: 5301 - protein, 501 aa, synthetic construct
  REGION 1..501: note = TnsF-Tn7 System Protein
MTMEPEGLNPRNTVRGRPRKTYGTRDCARCGKPLRRVQATWPEGRVCFPCWFVAIHTRGECPRCGVDRLLPGPADENGRNVCGPCAGIVDDFHCGRCGAEAGHHRKNLCARCALRDDLHVLLGGVPADPTLAGLVDALCSAERPESILIWKRSPKVQQFLRSLGDGSIAPTHEGLDSHPGRVTEHLRALMQHNGLLPQRDPWLPVFEQWIEAKLADLPIEVRRPVERFATWHHLRRIREIELVGGQTRPSIRWSKQEITETAKFLLWLHQAYGRTAAECTKGDIDEWIAGGPTTRTAIRTFVVTTLPAFTGRTIAMDHRTARSTPTISQDQRLSWIRELLAGTSESLPYRVAGILILLYAQPLNRIAALRTDAVDDTQHGPMTITFGKHPVDVPEPFAALLRDHLSNRPNLRTGSNSSSPWFFPGYHAGDHVHVDTIMHRLRQLGLSNLGGRNRSLDELVVECPPPIVADAVNYSCQVATKHAANAGESWARYTGRRIREP

SEQ ID NO: 5302 - protein, 501 aa, synthetic construct; identical to SEQ ID NO: 5301
  REGION 1..501: note = TnsF-Tn7 System Protein

SEQ ID NO: 5303 - protein, 367 aa, synthetic construct
  REGION 1..367: note = TnsF-Tn7 System Protein
MRIDDAGRVHLVDAIPVLRPEEQIVEMMLDGWRNQQLSRNLQFATIDQRISCVRRFIAHSNEEPWNWTPTMVEEFSADLRSVRHVAHATLRGYQNSLRAFTSYVSNPDYGWDLVCEKHFGTHPAQVFFDWNTARHVQEDDSQPQRRPYSREELDALFDHADDEVERIGTTSRKGWQAAYRDATMMKLAYAYGLRFNELSHLQTIDFARNPHAPEFGKFGVCKVRFGKARRGSPPKGRSVLTVWRWTPPIIEDWLANGRGDPGTLDLFTSERGGLVGETTLLKRLKRYRKDLGIPDGVDLHSFRRSYATHLLEAGWDPRFVQDQMGHEHASTTGIYQFTSDEFRRSSLRAVLDRTVDNALELGARRNT

SEQ ID NO: 5304 - protein, 111 aa, synthetic construct
  REGION 1..111: note = TnsF-Tn7 System Protein
MTRRDVDYTWRLAELMAARGLNNTTDLVPLLAERGIALSRPQVYRLVNQRPERVSLQLIAAVCDIFSCSPGDLLTVTAADARHKKAVNASPPNVVTLDRSTRPRRANILDE

SEQ ID NO: 5305 - protein, 374 aa, synthetic construct
  REGION 1..374: note = TnsF-Tn7 System Protein
MATDDICFPCSVGITHTCPICQAVVSGSGNAPCYPCSQRRRPERQIDEEAATIPIRWMSGMFITFCRGRIPLDDGLASQRITRAAEACRAIAARDPAYGRITTDDVHAAIGAEATRRVAPLIEFMCDVGVLEWDRARLKVLVENDRVDSILMAHQDSPHASLLRQYRDDLAARGRKPVTQQNALTAAVALLAALGDKPLAELSQRHLARALRKTPGQRASLKGFLSFVAGQGGPKLTLPALHPTDPVAQERQLREEIKAWRQRLRKPRHTDEAKALLALLIARIHALPIPRVLSLRDNDVTVTYTSVTLWPEADAITLEESLVGAFRRWAEWSVGYASPPNPWCFKGRYSYEALSEAAVAYYRKPDTKGKPPKY

SEQ ID NO: 5306 - protein, 1754 aa, synthetic construct
  REGION 1..1754: note = TnsF-Tn7 System Protein
MDAFGLDQTLIRDYDAFARSFNKIAADDIRTEVDRLYDNKAFWPDPLITINPHFARGETLDDLVKDDVLHPLTTHIFRERGRVLKPHLHQVEALTKAKAGKSFVVTTGTGSGKSLCYFLPIIDEAIRERQKPDFKPRTRAIVVYPMNALANSQFEGLTEFLNQCGIPEAQRPRVRIYTGQESREKREEVRDNPPDILLTNFMMLELLLTRQSELDAQVIGNARGLRWIVLDELHTYRGRQGADVAVLVRRLRDQLCRGHSEPVCIGTSATMATPDQGNSIKAVAKVASDLFGVSVETDCVIEETLQRATDEDLTVASVQSQLAACIQNPVPTNATDAELKIHPLAVWIELRIGLEYKPQFKRRPPMTLVDAAKDLSDETGCDAELCEQRLREMLSLLARPGAERGGTGSRAFLAFKLHRFISGAGLVYTTLRTAGPTGIRRVTLKGQTHHPDDKTALLFSTHFCRDCGHEYHPVMRLDDEDGDRFVARSIDDPINERETDGGIAGYLVPEPETINEFFQGALDEYPDEWVEHTPRGSRLKSTRRKQQVAAAVVLPNGHVDAAGRQAWFIPGRWRFCLNCKLEAQPGTREQNKLAGLTAEGRSSATTLIVSSLLRFMHRPEAKIADDKRKVLGFSDNRQDAALQAGHFNDFIFTTLLRAAVLSAVQAAGPDGLAEAEYGTAVQKALGFEDNNDDRRRHWMRSPDAIGPSRARAITDLTRVLSHRVWSDQRRGWRYTNLNLENLQLIRAHYPGLESCADEGLFKDASLLRGLKPDERRRVFNALFEVMRGELAVESDFLKKATTESLGRSSRDNLRAPWAISEQEAVSNAGLLIVPEGAGGKAQPSGRGPDSRLITAGPNSRVGKKLRHGHLWGGRRLTVHEYNELLESVVRIAKAQNWVREVSGYGITGLRLLPSAIRLVADAPKTDVNTYFTRLYRETANILTSDDDSLLGFESREHTAQVDKDLRLWREARFRWGDAGKRNLDVMRADQTNPLEADSFLPVLFCSPTMELGVDISVLNAVYLRNAPPTPANYAQRSGRAGRSGQAALIVTYCAAQSPHDQYYFARREQLVAGSVRPPGIDLANRDLIEAHLNAIWLAKAGIDGRLRQELPDAIPDILDLDTPKRTVRAEITDRLANPDRVVGVEDDFERILGNIRTSISPAVLNDPGSDWLKNSKPFVADVAKTASQRFNNAFGRWRDLYNAAFAQMEEASRQIMKPGLTKQARDAAERALRIANSQIRLLEHGGKSDNSDFASHRYLATEGYLPGYNFPRLPLYAYVPEQGSTGPRAAYLQRARFLAIAEFGPGSLIYHEGRAFKVVRAKIPPDVRDPQGMLAVGNLAVWRVCRTCGAGHEGAGQNLCHACGAQIGGNGSKLIQKVLRIENVETVPSERITANEEARRGRGFEIQTTFTWAKRNGQSDVLTAVAEDDDGTVLDLTYAPRAQISRLNLGLRKRKPETGFGYPIDPQNGQWVGADREQDDDDADPTEPDRPGAVRVVPIVQDHKNAALLKLFGPEAQETTLATFQYAIARGLSLVFQVEEGEIATEAVPDRRKRKAILAYESSEGGAGVLRRLVSEPERLAEVAHRALEVMHFTPESIQDALITRDASKLQDLDNAFCVRGCYRCLLSYYNQMDHALIDRTDESARTALVRLAAGVIRSTSVVCTVAPAAASTETWPQAIGRWGLPPCDAKRLKFDADGILDVWRSHHVAIAYAPPPQDIVDELEDGGWTLVVLTGAPEQDPPSTLSSLFKVAA

SEQ ID NO: 5307 - protein, 919 aa, synthetic construct
  REGION 1..919: note = TnsF-Tn7 System Protein
MTVQFSPGDLVRARGREWVTLPHDDPAALRLRPLSGTEADALTILPALERVPVEAAHFVPPEVDVRGTQESARLLAEALRLSLRRGAGPFRSSARVSFEPRAYQLVPLLMAMRLSVVRLLIADDVGIGKTIEAGLILRELLDRGEIERFCVLCPPHLVEQWVGELRAKFDIEAVAVTSASAPRLERKVVGTQSLFEVHPFTVVSLDYIKAEKRRESFAASCPPCVVVDEAHACVGTHGSRQRRYRLLQRLAKDAARHMLLLTATPHSGDEEAFDRLLKLLDESFAMEGLDTNAGRIALARHFVQRRRKDILEQKWEADQIFPKHEKLDRPYSLGSEHGAFHDAVLDYCLDRIEDAGDGTHRQRLTLWSTLALLRCVGSSPAAALNALRNRQDGDPERLSMQVLDEEDEDTEAVDAEPSAYLGTDPALAKLIRQAEALVEKPDPKLAMMIKELKPLIAAGANPVVFCRYIATAEYVAAALRKTFPGLAVESVTGLLVPDDRRDRVEGMAEEPQRLLVATDCLSEGINLQMLFDAVVHYDLSWNPTRHQQREGRVDRFGQPAPLVKSMLLFGSDSLIDSAVLSVILRKAERIRKDLGVIIALPEDRQVISGALLNAMLEHRGRPGAQRQFDLFAKEADALSASWRDAEEGEKRSRARYAQNALKPAEVMPEWESWRAIIGGPDRVERFVAHAMNHFNTALEPARGATYRADLAKLPPAITERLDASGVRGEVRISFEAKAPAGAVTVGRAHPIAATLAESLLETALDLKSNTGFELARTGVWSTSAVEVMTTVVLVRLRHKLTVHGRSDRMLLAEEAVTLAFAGASATAIADGEAAQQLLEAPASGDLAETARHRLIERGRERILSMSMPAIDAYAMQRGEALEADHRRVRAAAQGTPRVTVEPILPADIVGLYVLTPGDL

SEQ ID NO: 5308 - protein, 342 aa, synthetic construct
  REGION 1..342: note = TnsF-Tn7 System Protein
MTAIGSLDRSVADPIGLITELVADAESGLGSETIQIVVTAVAGGRAKSRALAKFLATRPAVLADGRSPAPRAVGDLLIALRKAGASAISPPVCADCGKGLRSLQRQGQDWYCSVCIKETTECAACGNTRRVTFRDRKGLPRCSMCPDHDDRDPATVIHTVINTIAPGADRDAVAEALRLSAPHRPHYRQRLVWALEENPRLLTGEAHLAPHRAILRFIDLLHEAGVAGIARPSCPRCHRVVRIDKLLDGQRVCRNCIAKSRVEECVRCKARREPATRDDQGRPLCPNCLVNDPANVEVCINCGKRKRVQNRTSDGPLCSNCCPSPSSSARSAAAPHPAPTPG

SEQ ID NO: 5309 - protein, 358 aa, synthetic construct
  REGION 1..358: note = TnsF-Tn7 System Protein
MRWLAGGIVSTVLSDLGSGRRPLTHEALDELPAGKVVEHIRSVLVATGTLPQRDEQMVRLVRHVNDLVTSHATAEGRKVLHRYATWHLLRRLRRRSRGNDITHTQLTVVRQHLRAAVHLLNWLDDQHLTLATCRQADLERWMTNDDVRHRKEAGHFVRWALAQKIARDLSFPAVRWNGPSQAMDDEARWATARRLLHDDTLKSEDRLAGLLLLLYAQWPAAISRLTVDHIEEAGGAVRIRLGAVPVDLPGPVAELALQQVAVRRSHAVLARTDSPWLFPGGQPGRPISVWAMGERLRKLGIRLAETRSTALFQLATELPAAVLARTLGIDITVAVKWQRAAAGDWGSYAAEVSRRNSS

SEQ ID NO: 5310 - protein, 339 aa, synthetic construct
  REGION 1..339: note = TnsF-Tn7 System Protein
MFDAMLRGWRAQQKSRGLKDDTIDPRERLIRRFLEFANDYPWQWTPAHMDEWSVSLTSEKHLAPSTIRSYQGTVRLFNEFLIDGRYGWGPACEKTFGTFPVAVCHEWNTIAHLNDYEGDPEAKPFTREQLQLFLDYADDQVERALRAKRKGALAAYRDATLFKVIYGWGLRRTETSKLDVVDFGRNPQARQFGRYGTLNVRYGKAKKGQPPRRRNVLSVMDWAVEAVADYVENVRPRFGFPDHPALWITERGGRLRPGSINDRFEAYRDALKLPKELVPHSLRHSYVTHLTEDGVDRRFIQQQVGHESDSSLAIYTHVSDDFMNTSLHKALAPAFAGVR

SEQ ID NO: 5311 - protein, 342 aa, synthetic construct; identical to SEQ ID NO: 5308
  REGION 1..342: note = TnsF-Tn7 System Protein

SEQ ID NO: 5312 - protein, 116 aa, synthetic construct
  REGION 1..116: note = TnsF-Tn7 System Protein
MAAKLDYHWHLRKVMADRGMFSTTDLLPPLAERGITLSSSQVYRLVVERPERLSLKILMALLDILDCTMDDLIEPIAVAGMVKKPKKAAVGGTAPDAEGLGGLRPKRARIRGGDRP

SEQ ID NO: 5313 - protein, 544 aa, synthetic construct
  REGION 1..544: note = TnsF-Tn7 System Protein
MGYKRCDCLRCGKPVGLLGRQHCTRCAQRLRKAAAKQPCPDCGHARLLVTKTGRCVTCSRRCTECGKPVRARGASICRPCQHRAGREAAKAPCPRCGKRYLLRAETGRCGRCSHPGPARKPPRACVTCGQVRRHEAHGMCRLCFQRDPDRPFVRGDNLIARLTDPPRWLPDCVAYLAEHHSVDRACDLITTLGQLLTDGHSCHPQQLLERARQPGRSMGTLARALEDFFVERHLALPTDHAARLAAGRRQRRIAETPKSLRAAVAAFETALLRARQRSSRARTRPRADSTLDSLLSTVRDLARFLFTQRGKPDWATVDIHDIEAFLAQDSQLPRRRLPALRQFFRFARTHRLVLIDPTAGLSTKAPNGFIGQTLTMQQQRDLFRRWTTDTSTHPHEALIGILALLHGASSREVQHLQCTDIDPADRTIRTGQRPHPVPLDPASWAILQRCLTHRQAQHTSNPHLVVNHITRTRSNPASANYLNSRLPDGVTPRTLRGTRLLDLVNGMDPKLVAVAFGMHPQAAMRYLADHADADHLTSTTPPNP

SEQ ID NO: 5314 - protein, 347 aa, synthetic construct
  REGION 1..347: note = TnsF-Tn7 System Protein
MIQGQSVADAELPSDPVRFQVECLDAFVASWTARGFSPVTITNETGVLERMLTALGKPVWEASPDDVDRVLGALAAEGVGASTRRNYVQALKAFHRFLVARKSADIEAAFGVRLSSPVDEFNAARHVADDSPRELPPPEAERVEAFFAFLRNRIATARKYAPAARDYALFRTVYHVGLRSEEASLLEVSDVHFGRGPFGKLHVRFGKGARTSGPRPRWVPMLDGLDLILRWYLADVRPKLPDSPVLFCDQSGGPLSRGTIRNRLSYLQTVEGCATGDRFSPHGLRRACATHNYERGVDLVAIQQLLGHWTVGSTMRYVRPSATFIEDAYRNAVSTTLTALQHEDGKE

SEQ ID NO: 5315 - protein, 104 aa, synthetic construct
  REGION 1..104: note = TnsF-Tn7 System Protein
MRIRWKLRMAAAQREIWTGTQLRRLLAERAGLQLSSASVSALFTKEPSQIKLSTLIALCTALECTPNDLFEVDTTPVAQPATAEGQHAREPRAVNAQGRSMPPL

SEQ ID NO: 5316 - protein, 593 aa, synthetic construct
  REGION 1..593: note = TnsF-Tn7 System Protein
MSAPKTCEGCGLKPQAYHGRHFCYDCKPGTNGRPLPCRRCGATGDYWSERLCRRCHQHAPQLPDSCHDCLAWGTTRTLKWLCAACTGWRHRYPGTSVCISCRRDLALNEHQACRLCWFQTFLYQAQAGLPRDVLAANPGSQQLWLANMANPRNGYRPRARRDYTNPRDQIHPPGHDATIEQHDGAPLPMPDPDQLDLFAYDRVESTARRFGFGEPPSTRFASMLDQHVLDHAVRHGWTDRQTIRTRITLRVLQARHRIDCGPIKASGVLGLKDLDLSVRLALAVLADNDLLVDDRVPPLHSWFARQIADLPDPMAGELQAWFDVLHYGSTTPPRSYPRNDVTIKTRTRWAMPTLRAWAEAGHQSLREITRDDVLAVLPAQGTPRVKLGAALRSIFTTLKRHRILFVNPMARMRIGNLERRIPMPIDTTRIRDAFESADPVTAAITTLIGIHGLRPGEACALLMTDVRDHRIVLPDRTILLAAETKAKLDAYLAHRRNRWPGSINAHFLIHTRSAGTLEQVKVPWLTDKLGMPTHALRQDRILAEVHAGGDLRQICDFFGVTIATAEHYASAISHPELDNFATGPSGSRTDTPH

SEQ ID NO: 5317 - protein, 381 aa, synthetic construct
  REGION 1..381: note = TnsF-Tn7 System Protein
MTLTVVRSLDSARSLRSSVDVEEFEQELIDQYSLSLAAVGLNDKTAAADRSVVFEFAHFLGRPLWTAQVEDADRYLRAARRERRLATSTVAGKAAALAKFYEFVIVRYQGDIHAVFDQVVVQPIDEFNRPRAVGAKTAGRIPPRDDEVRDLFDGWAESLPATRKYLPAARDYLAASLWRRTGLRINETVMLDVGDWHPELGNHGKLHVRHGKGSRGRGAKVRIVPAIDEVDALLEWWLNDVRPQYGDDYDDPNAPLFPSERHDPMTGHCTRIGAEALRTGLGDAVGRWLPGWSGRLSPHVLRHYCASHLYEQGMTLKAIQELLGHSWLSTTTQYIHVRTNHIETSWAESTERTLARLGTTNRTNHQANGTTNDKASENEEV

SEQ ID NO: 5318 - protein, 108 aa, synthetic construct
  REGION 1..108: note = TnsF-Tn7 System Protein
MRWNMRMKAAEAGIWKSTQLRQMFADAGLEISAGKMSGWWAGTPTTIRLEDLDVICFVLNCTPTDLLICEPEAVAARKPEKKRAAGTQGAKKTTRRPAPGRTRSKPPA

SEQ ID NO: 5319 - protein, 490 aa, synthetic construct
  REGION 1..490: note = TnsF-Tn7 System Protein
MTEASRYLSEYGDLSHLPLFSRPTNESTPAAAKLGAPITAPAPSGPDVDWSVVSELRAGASKQLSQAVASDRSRLDKAAQQELGRSIILDLVESAMADDVDAGRGAWSPARQQATAQAVFDSLFRLGRLQPLVDNDDIENIVIVGHDNVLLELVDGTLVDGPPVADSDQELIDFLVFLASRSEVNARSFSEAQPRLHLRLDGGSRLAAAAWVTPRPSVVIRRHRLMQVTLDDLVAREMMTPTAASFLRAAVRARRSIVVAGAQGAGKTTLVRALCAEIDAMEAIGTFETEYELHLHELGRHKVVHAWEARPGSGERGPDGRQAGEFTLDEALVDSFRFNLSRQIVGEVRGKEIWAMIKAMESGTGSISTTHAADAVSAVRKLVTCAMEAGPHVTQGLATSKLAATVDLIVQLSMETTAVPGGAQRTRRVAEIIALAPGEREVGYATTHVFRADASGVAVPDVLPDEYRALAQYGFDLAAYLSTQPYGGQP

SEQ ID NO: 5320 - protein, 490 aa, synthetic construct; identical to SEQ ID NO: 5319
  REGION 1..490: note = TnsF-Tn7 System Protein

SEQ ID NO: 5321 - protein, 843 aa, synthetic construct
  REGION 1..843: note = TnsF-Tn7 System Protein
MADEELPRYATAPEDVICEVVRSADASCRALDVTKVITAVFRHRPQRRELAEALVADPGLLTSGRGQGPRSIERLIRALRECGATGVVLPGCGDCGQQRPLKALAETGRICGTCVGRRRVRVNPCVICGSINFVGRDRDGRARCRKHPPDAGVDPACELGRLLAGATGLSEEAVAEAVATVERSRGGRLKLLWSLQDAPDQLGGGDPVGPPKISALARVLVDLGAVGVVVPLCPFCRTSTQLRSRRDGLRCCTACWSQVRIEWCARCRRERPIGGRAFDGQPVCGSCRQADAFNRRPCSGCGELRVRKNRTAEGGLCYACTEVPAATCATCRQHRPCRYANTASPRCLPCCAKAREQAVCVGCGQLRRVNNRTATGEPLCASCGVKPKPCTGCGKTFKPAGRTSDGRPLCQTCWGKDPGARRPCTSCGAVERLYHRGLCPGCTRERSVNEVLTGPDGRVRPELDGVRAALFLPPPRTVLRWINKTPARHAAFRALAEADGPVTHAVLDRVADDAVAAHLRALLVAGGALPERDEHLARLEAWLTRTIARVPDPEERRILWRYVRWQPLRRLRRLPPGRHVTHGQADAVRMEIRNVVRLLEWLHPSGTGLADCTQDELDAWLADGAPQRTLVRGFVRWTSRHHHSKPLTAPLYTSNLAAQVIAQDQRWRLVRRLISDTELQTTDRAAGLLLLLFAQPAARICRLTADHVLDDGHTLRLRLGRQPVDIPAPLDDLIRELARRRRIRAPVGPEHGERWLFPGMYAGRPLEPHSLGRRLKNLGIRPRVARNSSLMDIASELPAYVFSRLLGFSQSTADNWDTEAGGFGPAYGAELSRRTTTDKFTLP

SEQ ID NO: 5322 - protein, 843 aa, synthetic construct; identical to SEQ ID NO: 5321
  REGION 1..843: note = TnsF-Tn7 System Protein

SEQ ID NO: 5323 - protein, 501 aa, synthetic construct
  REGION 1..501: note = TnsF-Tn7 System Protein
MPRTRASASPLFVPRKTTRAEQRAARAGFTEARRQARLAGNPPKHRAEQTLDPDLRPTYPPAGRPGPASARGGKLALPAHRMTTATASGAYPFVAEGGLGAEGVFIGRDVHAEAAFCFDPFSLYNSGRVEGFTNPNAVLAGIIGMGKSALAKSIATRSIAHGYRIYIPCDPKGEWTGVSQALGGYSIALGPGLPGRLNPLDAPARPASVSEEDWFTEVRKRRLLLLASLARTVLKRDLLPMEHTALDLALDLVVADAAARGTVPLLGEIAHVLGSPERLDHALGHQAGHLGSAAQDLAHALRRLVHGDLSGMFDAPSTVSFDPTTPMLSIDLSRLGGSGDDTALVLAMTCASAWMESALSDPDGGRRWVIYDEAWRLMRHVGLLERMQSQWKLSRGLGIANLMVIHRLSDLLSAGDAGSRGRVLAEGLLADCSTRIIYRQEPDQLAAAASLLGLTGVETQAVSALTKGRGLWKVAGRSFITQHILHPAERELFDTDARMAA

SEQ ID NO: 5324 - protein, 501 aa, synthetic construct; identical to SEQ ID NO: 5323
  REGION 1..501: note = TnsF-Tn7 System Protein

SEQ ID NO: 5325 - protein, 114 aa, synthetic construct
  REGION 1..114: note = TnsF-Tn7 System Protein
MTAMLDYRWHLREVMAARGMFSTTDLKPLLAERGIELSASQTYRLVAERPERLSLKVLMALLDILGCRMDELIEPVPAAGSIRRRRAAGDRSTAAAGDGGVGEFRPKRARIVPE

SEQ ID NO: 5326 - protein, 451 aa, synthetic construct
  REGION 1..451: note = TnsF-Tn7 System Protein
MCNPCYSRIRRSATACPRCQETKVLAFHDDAGLVVCAGCAGEPARFECKNCGSEVQLTGSQCGRCRMKDRATALLSQDDGTMHPGFNGLYQHFLATPDPRTVTRWIRHSPIRETLHAMARGQLPISHLSLDQLTQTHRVRYLRQVLISAGTLPAQDMHLHAYEVYSSKFISAIPPHQASILTRYQRWYVLRVMRRASAKAPTSVNTVNRRRAELRAIAAFLTWLDNQGHCLETATQAHLDRYLAMTAGTATALSTFIKWAHEQHLASEITLPRKPSMPGTAAGHEELWDKVELLLRDESISRDVRIIGLFLLLFGQRVANTVRLKRSDVAVTGTKVSVIFGADAIELPPALASLVLAQLQSPTNRYIYHRTEINWLFNGFVPGQHVTPNHISMRLFEAGIKVRPFRQAAMLQLAAAVPVRVIADTLGLSVYTASQWAQRSGHIWNDYPAIR

SEQ ID NO: 5327 - protein, 451 aa, synthetic construct; identical to SEQ ID NO: 5326
  REGION 1..451: note = TnsF-Tn7 System Protein

SEQ ID NO: 5328 - protein, 371 aa, synthetic construct
  REGION 1..371: note = TnsF-Tn7 System Protein
MVDGTRPASPLLHLLDNVHPLHEDEFVFAAMLSGWRDQQVSRGLAASTVTSRILFIRRFADYCDKLPWQWIPGDVEDFTVHCSSGEGRLAKSTIRAYQARIRVFCDFITDTRYDWIEQCQKRFGYIPQQICHEWNTTAHIADYEGRPERRALTYDELDEFFGTADARVETIIQSGKKGALAALRDTPIFKTVYAFGLRRAEAVGLDIADLRPNPSASRFGNYGSVDVRWGKGSNGSGPRRRTILALPEFDWAIDGLRQWVELGRMRVTNERRGALWPTERGTRVSLRYLDDRFAEIRDGAGLPKELSLHSLRHSYVTNLIEWGYSEKFVQDQVGHLYASTTAIYTSVGSDYKNRVIARALSRVYGDHNAHL

SEQ ID NO: 5329 - protein, 117 aa, synthetic construct
  REGION 1..117: note = TnsF-Tn7 System Protein
MRTSDDQSPIAWRLRELMAAAGMFHTTDLVGPLQDVGIQLSREQVFRLVTKTPARLNVEVLAGLCQILSCTPNDLIQINPAAATTDALRTGTTDTTAPESRSIGDLRPVPARIRRPT

SEQ ID NO: 5330 - protein, 554 aa, synthetic construct
  REGION 1..554: note = TnsF-Tn7 System Protein
MASTIVSGTCFRCGRVRNLRWNHALDRGECRACRARRSPKETCAGCRRQRRVNARTRDGGALCVTCYARTRTTDDACDECGSIGPLAIRAGGRGSSSRSLCVRCYRNPRRPCGICGRLKRVALKATATTPDVCPTCYQAPVIDCSLCGQQALGRRTTNHGWPRCFACQSAQQIDAALTGPDGTIRPELKPVRDALTEFRQPRSLLNNWHDLPSLHLLTDIARGRLDLSHDALDARPQVFSVTYLRAMLVAAGALPPRDENAARLHRHAAEAVTDITDPELRGVLTRYARWHVVGRAKTDRHGHLTAHVAARCRSDIQAAHAFLDHLTALGHDLDDCPQTCVDAWLSTNRSARLTFIRWLKRGGYLPQTRLPDPVAQKDPSHDIDPEDQLARVRQFLHDPDSASVEDRAAACLILLYAQPVAKIAALTTNDVGVRGGDTYLALGSEPMLLIPPLDALVTALPVAKPFGTASTLADTRWLFTGKNAGTHLHPASLMARMNRLGIITRASRNTALLHLVSTTPPAVFASLIGIHVNTATRWAELTGSAWNNYAGARR

SEQ ID NO: 5331 - protein, 554 aa, synthetic construct; identical to SEQ ID NO: 5330
  REGION 1..554: note = TnsF-Tn7 System Protein

SEQ ID NO: 5332 - protein, 324 aa, synthetic construct
  REGION 1..324: note = TnsF-Tn7 System Protein
MRQSLSVLAAGVAPASTDAVVEATGLVKRFGAARALDGLDLTVARGEVHGFLGPNGAGKSTAIRGLLGQLRLDAGSARVFGLDPWRQAVEIHGLLAYVPGDVALWPSLTGGECIDLLLSLQGSGSRRRRAELLDRFQLDPTKRVRTYSKGNRQKVALIAALATDAELLVLDEPTSGLDPVMEAEFQRSILEARDAGRTVLLSSHILGEVEALCDRVTIIRQGRTVRTGTLDALRGDTLTSIEAVTAQPVVGLGRLEGVSALVERPVPGAVRTTFRAAQDELARAVGLVVAAQPTSLVVAPPSLDELFLGHYQQDLPAGPAVIEG

SEQ ID NO: 5333 - protein, 324 aa, synthetic construct; identical to SEQ ID NO: 5332
  REGION 1..324: note = TnsF-Tn7 System Protein

SEQ ID NO: 5334 - protein, 373 aa, synthetic construct
  REGION 1..373: note = TnsF-Tn7 System Protein
MDFEDGNRPGSVVALRPGNVSLLRPAEQVFDDMLTGWSAQQSSRMLNPKTIQARLAQVRRFTGFCGNLPWEWAPADVEEWTTELVSGDKPCSHGTIRSYQNAVALFCDFLTDRRYGWIERCEELFGTHPVQICHEWNTAIHTGDHETRPAVRPLSRSEVQTFFDYADDRVDQARTRGKKGWKSVFRDATLFKMIYAFGLRRREVGMLDLHDFTRNPTATEFGRFGVCNVRWAKASRGSQPRRRAVLAVFDWTRPVIEEYVTDVLPLFDVADAAMLWPTERQSRITGSYIGMRFAEYRDDLGFDAALHPHCLRHSYVTHLIEDGFDPLFVQQQVGHRWGSTTALYTGVSGDYRNRTLRRALDAAFTPPTAIEEG

SEQ ID NO: 5335 - protein, 495 aa, synthetic construct
  REGION 1..495: note = TnsF-Tn7 System Protein
MSARESERLHASVLVAPAAERRRLRTQRRQAAAALRAEQHRTEQAAARAKADAERAERRATTYLPAAGESGAAALRTPGRFRLPRHQDTSATLAGAYPFVAEGGLGADGVFVGQDLYSGGSFVYDPWVLYARGIITAPNVVLAGIVGSGKSSLAKSLYTRSLPFGRRVYVPGDPKGEHTPVANAVGGKAIVLGHGLNTRLNPLDEGHRPTGLSDQEWAITVAARRRDLIGALAETVLARGLTPLEHTAIDLALTAVVAENTVPILPMVVDRILTPDETADGRLAEDGRLVGHALRRLVAGDLAGLFDGPSTVQFDPSLPMISLDLSRVTENSTLISVLMTCSSAWMESALLDPNGGQRWVIYDEAWRLMSHPALLKRMDAHWRLARHYGIANMLIFHKLSDLDNVGDAGSAMRSLANSLLANAETRIVYRQESDQLGPTAQALGLTGTEQKLLPSLGVGQGLWRIKDRAFVTQHQLHPAELALFDTSSRLTSGVK

SEQ ID NO: 5336 - protein, 495 aa, synthetic construct; identical to SEQ ID NO: 5335
  REGION 1..495: note = TnsF-Tn7 System Protein

SEQ ID NO: 5337 - protein, 112 aa, synthetic construct
  REGION 1..112: note = TnsF-Tn7 System Protein
MTKTVAYHWHLRKVMNEHGMNATTDLVPLLAERGVVMTSTQVYRIVTGEPERLNMRLLAALCDIFDVTPNDLIEPYVATSSRRGRKTGTTGATPPKPSKNRPTRAVIKPAGD

SEQ ID NO: 5338 - protein, 817 aa, synthetic construct
  REGION 1..817: note = TnsF-Tn7 System Protein
MTTAATHDRIAEPEREPLDELVDVLCRVETSLDRRVVRLVTADVVQQRARQRRLAAELTEAPDVLSTGRPPAPIMVGKLLLALRRAGAEQLAAPVCGVCGRVLRGLNFAGRMWGCSTCVSTPTLAACTECGQNRSVYGRDRNGRPFCRACFVEDDITALLAEVVIGIDSAVTAEAVIGALERAHQRPAGRRQIAAAVVERPELLSGEGASAPIPGVLRFIEELRAAGATSVVAPPCPGCGRAKPLESPLGAVRVCASCAAKARASLCSRCGKQKPINHRDENGDAFCQPCWASDPRNREVCVGCGNRRRVYGRTDAGPVCLQCRPRPERECSICGRTGRGTISRATGKPLCDLCKGHWIVCSGCGDGGLVRGGTLKEPLCARCVNPDPDFWKRCRICSTTWQLTTAPCTRCSLDARLRKVFTADDGTIAPELDRLRERLVQVDRPIYAITWLAKTNVQSTITSLVREQSTITHDALDAMPPSKTLDHFRSMLISVGALEFRDEGLMRLEREVKETLDGYAPGEHPRALRGFILWHLMRRLRGRLKDKPASVQQIQNVRAHLAGADGFLRWLEGRDKTLSGCAQSDVESYLNTKPAHPKRCSAFVRWAVRRRYAPAGIKAPAIRWTGPAGPHDQDDRWAVARRLLNEDSVATADRVAGLLVLLYAQTASSIHRLTTDRVTRDGEHVLLSLGAEPIQMPAPLDRLMLDLVASRGTDTLIRHEGDWLFPGRAAGQPIHVSQLLRRLRAAGVKPRQGRSTALFALAQQLPAAVLARMLGVNVSVAVTWQRASGGDWMTYAAAVAARSATRARPETGNAPAS

SEQ ID NO: 5339 - protein, 722 aa, synthetic construct
  REGION 1..722: note = TnsF-Tn7 System Protein
MASSTVQPGNRVSGGGNHATNNTYSTLLQAGRDINLHEQEPLPTAPVPSSEIRAVRQAWVADDSEGKEISTAPTVLAMLSQDERVVVIAGPPGTGKTAAGLRALSELRPALPGAVGSKLLLRLEHMLPDWESVEKDKFLLPAGHGRGYLLDVSGESSHWAKPDVTARKFLGHAETLRRKGSYLVVISGERGWPENDPVLGRNVVRAVSAPPGDRIARRHIERLYPQVAHRGWLREGIREAGERDAGEGGDGQDGREALADLLRADMQPGDAATLALELSRISDSGGTVKDARDLVLRWRERVSTVFRETQESADDRALLLAAIMLEGLSPAEVLKGARLLLKDQQTRGIRDILTGRDLVTRLEAVQAKSEGQRVTFSHLPGYPAAVLRHFWRQLSDVQPDLILWVKHLTASKGLGAARVPEIADLLAQLAVEESDLRPLDVAQSWATAGGSGQDGASRLLARVARDPALGQEARSRLRYWAGHDSLANATVAAVVCQGPFSKEYPRQTLTCLRWVLGRAEHDTAVSRAEEALRAMGADTQLLPRVWDTVTGWLTEYAQPGDRNHLAARRAFLALLHPCADYPVATLLLANAREHADTADELVRGWSAALSVPGLEVQCEKVLAAWANAVADGALDADAVVEVLNQVIREHWMTGPLSTFIAGRAGTEYTSQSLVDLRERLILRWNDPRRPHPTPRDGQIPEPRPATPLDGEAGPRTETVGEA

SEQ ID NO: 5340 - protein, 722 aa, synthetic construct; identical to SEQ ID NO: 5339
  REGION 1..722: note = TnsF-Tn7 System Protein

SEQ ID NO: 5341 - protein, 817 aa, synthetic construct; identical to SEQ ID NO: 5338
  REGION 1..817: note = TnsF-Tn7 System Protein

SEQ ID NO: 5342 - protein, 367 aa, synthetic construct
  REGION 1..367: note = TnsF-Tn7 System Protein
MMRRPTTGLAGSANLELVSGALRFRPEDTVWEAMLSGWRSQQQARNLKKGTYEPREKLVRAFHTHTNEYPWHWTPAHMDEWSANLTSEKGLAPSTVRGYQGTVRLFSEYLIDPRYDWARACEEQFGTYPVAIAHEWNTIPHLQDYEGDPEARPFTREELQLFLDYADDQVERAIRSGRKGTLAAYRDATLFKVIYGWGLRRTETSKLDLVDFGRNPKTPQFGRYGTLNVRYGKAKKGQPPRRRNVLSVMDWAVESVEDYVENVRPRFGFPDQPALWITERGGRLRPGSINDRFVEYRDTLGLPKELCPHSLRHSYVTHQTEDGVDRMFIQQQVGHECDSSLAIYTHVSSDFMNTSLQNALAPAFAGL

SEQ ID NO: 5343 - protein, 117 aa, synthetic construct
  REGION 1..117: note = TnsF-Tn7 System Protein
MTAKLDYQWHLRKVMADRGMFSTTDLTEPLEEREIKLSSSQVYRLVVERPERLSLKILMALMDILDCRMDDLIEPISVAGAGARPKKAAAGGSSAAPTSEGLGSLRPKRARIIRGDQ

SEQ ID NO: 5344 - protein, 561 aa, synthetic construct
  REGION 1..561: note = TnsF-Tn7 System Protein
MKLAIELKPYFNETLTSWIIRNSIANGTDPKSFALSVFKTHSTWYKDIDRQISEEQLYLLCSVTSLTKQQIINLTLTSLVNTVVSKDLANPFKWGFIIPFGLKGSVRTSGFSFCPECLDEGNYCLKKEWKLAWCVSCTKHKKLLVTNCPNCNQPFSPHLIEYTSDKIYQCTNCTHDLRTIKTKQVNGEVLELQEELSSIAFNSKYNNDFPLLINSDIKDLFLTIEKLISFCRYAYLHEKYNTFFQEIAIEKLHTFQEGNNKSFSRLNTEDREFILLVINKVLKLKLDDIISLLQKIEISKTTFLKTTIHTSKTIQYIASNLKDTRMNKPARKVFKKIEPKNKYEVNDLFNDIEKHIPEALLNTEYSLPKKQYMKIQSSLKKGTSYYNFITHYKKYLNMQVEMSIVSVEHEKKIFSLTINFLIYCQNFKDTKLSVEMLHGYIWIYPKHRYIINKFIEFLSNNYSISLCMSNIPLIKLQRPKRSHEILKSRLIKLLQNNNSKLIKESQYFRIVIGYLHWIDIPTNIYINISNIKFNKVKNNYYINLNSYKFYIPIELVNFLIK

SEQ ID NO: 5345 - protein, 235 aa, synthetic construct
  REGION 1..235: note = TnsF-Tn7 System Protein
MKISMKKRKIGYTYGSVSGHFAFRKQKSIAFESTLERDMITLLEFNDSVSNVIEQPVTIEYINHNNRVVTYTPDFLVHFNEPNASLIKLDRKPLLIEVKPRDKLISDWDKLKAKFKIGIKYAKDNDMIFKIYDESRIRTPYLKNILFLKRYQKLTYKIEDTDMILSLLNSVGSSSIEYILEYLTTNKDQKGLLLSVIWYLIANKKILCKLDKALNTQTNIWINDNIEMSSNSGQE

SEQ ID NO: 5346 - protein, 626 aa, synthetic construct
  REGION 1..626: note = TnsF-Tn7 System Protein
MVKNSIQSVKLDRSSLNIKENEYVEYKNEIFKISGIIDFSYVIGISTETKRPERLEINSLKPISSQDIDNDIAIFKDTHEFTDKEFIEIHKKYLIIQPMLSNSISRKEIAAYAKKAGIHFTTLYRWLKKYRTTGTLAGLLPRPTGRKKGETRLDYQVEDIMNKVINTYYLSNQKPSIQAVINKINIECKNRELALPGKNTVRNRIYKISEYDVLKQQGNRTAAKTKYEPVPGKYKVDYPMQLIQIDHTPVDLMLVDDKYRKPIGRPYITVAIDIYSRMIVGYYLSLNPPSVTSVAMCISNTVLPKNNLLLELDINDNWDVWGFPNTIHVDNGADFRADAIRAAGLIHGINIEFRPVGRSNYGGHVERVIKTLMDGVHEIPGTTFSNIQQKGEYDPEKHASMTFSEFEKWLVTFITKVYHKRNHTGINMSPEKLWEVGVFGDEAPIGLLPKPSDPLSITIDFLPAFKRTIQKTGINIDGMNYYDHLLRTKILTKDKLTGKKKQFTCKRDPRDIKYIWFYDDDIQEYFKIPAADQSLPNMTLWEYDLIKRQLYDNGTRKINTEQIIEAHEELYLQIEDSVEKSKKARRAHQRIVNKNKELNKGFISEKKKESNVNNNDIWDEDIPDFG

SEQ ID NO: 5347 - protein, 561 aa, synthetic construct; identical to SEQ ID NO: 5344
  REGION 1..561: note = TnsF-Tn7 System Protein

SEQ ID NO: 5348 - protein, 303 aa, synthetic construct
  REGION 1..303: note = TnsF-Tn7 System Protein
MTTNNYAHCNIESQKIISLSKKERIRFLHQNILIQYPAINKVHNILEDFIDRPQKPRMQNLLIIGESNIGKTSIITSFEKKHSSYTLENEEGMSIVVRPVLLALASDNSDVKHLYISILESFWTPFNPSDSLAKLRHQMFYLLRECNVKVLIIDEIHHFLRGSPRQQRNVMDALKNIGNKLMIPLVCVGLKEAAMILTSDPQLSSRFDIIRLSKWELNANFRALLSSFEKRLPLKKPSLLHEKEKATLLHNTSQGNTGNLHRLLIECTTYAIENEIEEITLEIINKFKWMKPTNSMTPREIPV

SEQ ID NO: 5349 - protein, 303 aa, synthetic construct; identical to SEQ ID NO: 5348
  REGION 1..303: note = TnsF-Tn7 System Protein

SEQ ID NO: 5350 - protein, 522 aa, synthetic construct
  REGION 1..522: note = TnsF-Tn7 System Protein
MTRSHATDEQYERWFMAVCCRCGLRRHKAGAWPDGYVCRTCSDRAVRTRGTCPGCGEDRALPGLRPGDGAATCTTCAGFSQTFDCSRCGFEGKLLGGRLCERCALTDRLTALLDDGTGRVRPALVALFDLLVTMDKSGSGLAWLDMRRGQLGNAPQLLRRLGLGEIPLTHDAFHELQPWRAASHLEELLMACGVLPAVDKHLCSFQRWLPGHLADIADPEHTKTIRLFATWHVLPGLRARAERSHITPSIRRFASEQIKYATAFLQWLGERNTTLASCGQVDIDAWFAENAEHARTRLRGFLNWAMQGRYSRRSLAIPAMKISRRPALSEDERLTALGRLLTDTEIPMRLRVAGVIVLLYAQPLSRVVRLTIDDVIRDGDAVLLRLGEPPSPVPAPVAALLLEHITNRGNMNTATNPASRWLFPGRRTGQPLGPNHLSALLNKVGIPIAAARGAAIRQQLLELPAPVVADALGYHDKTTSRLRNETGGTTWSRYAPGDHARSPTGWVPRGTSEVGGPPVPRA

SEQ ID NO: 5351 - protein, 522 aa, synthetic construct; identical to SEQ ID NO: 5350
  REGION 1..522: note = TnsF-Tn7 System Protein

SEQ ID NO: 5352 - protein, 1072 aa, synthetic construct
  REGION 1..1072: note = TnsF-Tn7 System Protein
MRDAHRAEAERLLVRAVEEEVRRSGGRVDGAVLLSRARAGLDALARPAQEEYEAYTRALDEAAAGQLTFGQRYAREGAGTPLLVAAVAAVAAAVADLALGTGTGTALGAGAVAGVAGAAATVVKAGAAHLPAAHHRAGAAGQPGGSEQLRLQWLTALEVRGIRPFLDQQRVLTASTAPQKKAAPRLRGTDKSAAARRRSVLEQSFGQLPEPVGVFAGRRAELARIRQWVQAARAHTETRPTVVVLHGTPGSGRSTLAVRAAHELRDQFRGAVVVDLRGGSADEPPLPTRDALLHLLNRLGAPREQLLFRDRSSAEQQVKRLGELYDQHLTGLPVTIVLDDASDAGQVRALVPERSDSLVLVTAPAPLELPAGLSAWVHQLPVDALDEAGSEELLGAAAQDGSGPYDAESAERIRELCGGLPLALRVAGSSLGPRSPRRLAADLGAYGPVEPVERALWLRYTDQSEAARRLLRRLALAGRASLGGAAAAALLATDEAEAGRQLEALAGAGLLDHVRGSRYRLHDLVRAFAHARLLDEEEPAERTAAQERLIGNYAELADSVLRLVDGNNSTRSDRFSPHGFTSLDEALRWLDDESSFITAALRHAEGVNQAAVLNLLGALCDYCLLRGDLYRLGEISELTQAVDQGLLVRSVQWRTGIAARQLGELDKARTTLASVVDLYREAHHDAGAARALNSLGITLHHQGNLTEAAARLREAMALQDVPELAGDRAWTMHALAAVERDRGRLAEALDLLTRSLVLHREGGSVHGEAWAHFQLGQLALRQGEVERAEADLREALERYGRTRDARGEAWALTQLARARLLAGETAEAVEALRGAAGRHRDNEDARGEAWSLYYLGQALEETGDLDRAVRELERARTMFSRMRDVYGLACARHHSARVTRDQRAAQTGSLRNSGFARQLLVDARADFRRIGVAHGEAWTCLELAVVDAGNARTPQALALCDEALALFTSYGDRRGEDWARFLRCTLLPYAAPGGVEVGTAVAQEDLSALARAGHRLRDRKLEGYIDAYLLVLERGVSLEAGWQAWPLGMVPDRHAREVMGVEAAPAGGSGHA

SEQ ID NO: 5353 - protein, 1072 aa, synthetic construct; identical to SEQ ID NO: 5352
  REGION 1..1072: note = TnsF-Tn7 System Protein

SEQ ID NO: 5354 - protein, 354 aa, synthetic construct
  REGION 1..354: note = TnsF-Tn7 System Protein
MPSPHDKKSARRRIAAPTLAMLPRVGDSLSFLYADVVRIVQDDTGVCAETTTADNETTRVYIPTSALSCVLLGPGTSITQPALATFARHGTTVVCVGSGGVRCYSSTVPPALTTRWLEQQVQHWSDPVLRLDVARRMYTMRFKVPVPAGTTLQQLRGLEGQRMKALYKLLAQQHRIGRFRRSYDPDSWDSQDPVNLALSSANTCLYGIVHAALTALGCSPALGYVHQGTQLAFVYDIADLYKAELTVPLAFSLHDRHDPEAAARRSFREQLRLYRLLPRIVADVQSLLAPDEAEPLPDGHSVRMVNLWDPRAGSVAAGVNYARDAGGSPAEDDKPLPDLSDPAVPPGEQDPDPL

SEQ ID NO: 5355 - protein, 310 aa, synthetic construct
  REGION 1..310: note = TnsF-Tn7 System Protein
MPQISKVELHAAIRRDHRAGMKMRELERKYNVSWRTVKKAVVSVWPEPRKKLPPRPTALDPYKPVIDEMLRTELDAPRKQRHTITRIFHRLVQEYGADVFYQMVRCYVSGRKPEILAASGKAPVEAFVPQTHLPGHEAEVDFGDVTVRLAGELVTCYLFSLRMSYSGKAVHRVFASCGQEAFFEGHVHALRTLGGVPRSKIRYDNLKSAVAQVLGLNRARVETDRWIAFRSHFSIESFYCRHGIEGAHEKGGVEGMIGYLRRNHFTPVPEVVSLAELNEMVDQWDLHDGIAGSVHGRGPWMSTSPSNSRC

SEQ ID NO: 5356 - protein, 374 aa, synthetic construct
  REGION 1..374: note = TnsF-Tn7 System Protein
MGFNGSIPGAAGLHLVDGVALLRPEEQVFTAMLTGFANQQLARNLARMTVEGRENTVKAFAAYVNTYPWLWTPAMVDEWLGDLRSLRDLKRSTIRSYSEAVRAFCHFITDPLYEWTATCEERFGTHPVQVVHEWNTAVHVQDNEADAKKRAFTKAELHAFFAHCDDEVARIRAFRRKGWLPAFRDATLFKTAYAFGTRRNETRMLDAADFGRNPHGGEFGEYGRCQVRFGKAKKGSPPKRRGVLTVFDWTPDVLDEWFTEVRPLFGTDNNPAAWPSERGLRIGCQRLNSRFIAYRKALGLDDGLDFHSFRRSYVTHLIEDGWDPRFVQEQVGHEHASTTSLYTCVSSDFRTRTLRRHLDSTITAALQTQTGRQV

SEQ ID NO: 5357 - protein, 111 aa, synthetic construct
  REGION 1..111: note = TnsF-Tn7 System Protein
MKRKVGYTWRLREVMAQHQVFTATELVPLLRERGIDLSASQVHRLVSGTPERLSLQVMAALCDILSCTPADLVATTAENAGVRKTATGDLPTPPSNVAKLRPRAARILPDA

SEQ ID NO: 5358 - protein, 474 aa, synthetic construct
  REGION 1..474: note = TnsF-Tn7 System Protein
MEASRIKRCDNCGRKTEKFWRRYRGMSFCGTCYNREFKPCACHSCGKVMRAHKNEPKPKCSLCLRLSPCIRCGKITKRLGAITEYGNVCPSCRHYFQEPKACANCGKLTTRLSKSKLLGFEEPVCDKCYSSYRATCSSCGRHRKLTQADDGKRYCKSCSVKGTHNCKQCSQIMPAGYGSVCQKCYYENLFNKRVVTCLAGLNNQFYSDLFLEFSVWLKNDVGTHKAAITLNRNFPFFYFLNLHFPNKVPSYNELIVHHGEINTRINSFSIRFLCETQRMRITHKEKDAAANRRTVEKMLASKTGIPALDKLIFDYHQHLMKKLANNKTTLRSIRLAMSPAIAFVKEISASGKISVEQTALDQYLAKKPGQYSALTGFVLFCKNQGLKIEMIEKSELSVLHSRTSIERSLIKHIKDGDNLITSIKFRAIALAYFHHMPIQAAKDIVKRASISNTNTLYIAVELNNKKYILPAFYT

SEQ ID NO: 5359 - protein, 591 aa, synthetic construct
  REGION 1..591: note = TnsF-Tn7 System Protein
MPIDIKYPLRKVTKEIRLDKLKNDIQPMIAWWYVGIDRKHIKGTQPNIVVGFRKLVDGLWSDEVTHRLVPLTALGQVRLGTVWQKGICTDEVAYPEAYFKVDFSRQGWRTISFQEAYNSHSELPFPQEIHKLKYSGDQSRLLEFSLPNGGKLIVPCLEFFSRCYGRSGEVKRVLATYPWEETLDSGNSRLFSPLNEPEEEGKWKVKLRRRLVNGDIVLLAHAKYDEYTRNVAKSIYAQIEAGFNNEAHKMPLFFADMPPWFEGLAEIKAKGIWFNDNKSFLALRITGCSDPDGEIIERDRENTNKTDAPVDNGGQGDSWDGAPTRTKIKRPSIFDLTSEDDPNFNATPVEIYDDDFIVLGSQREVVDVRKEKAENSAGTKVQGDAPDNYSSAEPYGNNGLTGQASISARPVMDSEGMLSDMWSAMLRLKSRYSNVTSVEWYTFHDGYSDNPEIRLIGLKEVPADLEDIDVATRNWVYSNTSLKDKTRGVLVAKVMIGETPVHFLEIERRSQSSNTEESYRGLVFIPSATENFEVSLNILLENICLVKGVVTKVAHLCPGVGFSFKHSQSRNDQNLCDSALKNALDKVGFKI

SEQ ID NO: 5360 - protein, 513 aa, synthetic construct
  REGION 1..513: note = TnsF-Tn7 System Protein
MQLNPSEISELIKNRIQGVDDSANLRTQGTVVSVTDGICRIHGLADVMQGEMLEFPGNIFGLALNLERDSVGSVVLGEYESISEGDIVKCTGRILEVPVGPELLGRVVDALGAPIDGKGPINAKATDVIEKVAPGVIWRKSVDQPVQTGLKAIDAMVPVGRGQRELIIGDRQTGKTAVAVDTIINQKGKNLKCIYVAIGQKASSIMNVLRKLEEHGAMEYTTIVAASASDSAAMQYLAPYAGCTMGEYFRDRGEDALIIYDDLTKQAWAYRQISLLLRRPPGREAYPGDVFYLHSRLLERAARVNEDYVEKFTNGEVKGKTGSLTALPVIETQAGDVTAFVPTNVISITDGQIFLETDLFNAGIRPAINAGISVSRVGGAAQTKAVKKLSGGIRTDLAQYRELAAFAQFASDLDEATRKQLERGRRVTELLKQQQYKPLQVWEMSASLFAANSGYLDDVEVKDVLSFEKGMIDFLKTGHGALVDRIESTKEVSKDDEVALNDAIKAYKQVAAF

SEQ ID NO: 5361 - protein, 474 aa, synthetic construct; identical to SEQ ID NO: 5358
  REGION 1..474: note = TnsF-Tn7 System Protein

SEQ ID NO: 5362 - protein, 235 aa, synthetic construct
  REGION 1..235: note = TnsF-Tn7 System Protein
MNTNNCDKVQIPHQTRRIKPTRRSISGSFAFRKQSAIPFESTLERDFLIRKSFSPLVVDIIPQPVQLEYTANNGRTYRYTPDFLVYFRSVNYANELELKPLLVEVKYRDELREKWPDLRLKFKTALKYAKEQGWDFRIYDETRIRDQVLANIVSLKRYKNMTFSPEETAAILNHLTVIGQAPFSQLVASQFAGKWDTATGIAHVWHLVTMGLIECDMTIPLSNSTVVWRSIYDQI

SEQ ID NO: 5363 - protein, 645 aa, synthetic construct
  REGION 1..645: note = TnsF-Tn7 System Protein
MTKYNPDENGLALNRQKLTLDIGNLVKHDNIIYKVVEILDFNTLVGTDVDSGRSKALRINELSPVTTATDELRAVANLDTNSIEDADWVLANQRYEAIKPLLASNGGREAVNQRAIEVGVNPATLYRWLKRYTSLELVSALIPKQRGWREGSSRISDHAEALIKEVINDTYLTKQRSTAQKVIIEVKRRCLARGIEAPHPNTIRARINAISERHVLRGRGYREKAINKFMPAAGHFPETSYPLEVVQIDHTPVDIILVDDIHRQPIGRPYITLAIDIHTRMIVGYYLSFDPPSVTSVAMCLAHSVLPKDEWLALHNVEASWDVWGMMTTIHVDNGADFQSNSLKQSCLMHGINLEYRPVKQPRYGGHIERLIGTFAQEIHDLPGTTFSSVAQRDGYDSEKHAALTKSEFESLLVELICNVYHKRLHTTIGMTPERKWEIGLFGNATTVGHGLPPRPVNRISLLLDFLPSFSRTVQQTGVEVNGLRYYSDVLRGWISATEPDDKSTKRKFIFRQDPRDISAIWFYDPDVKGYYQIPFANLSLPSMSIWEYQQARTEAKKEGMKSVDEHQVLRALTDIRNKVDESKAKTKKARRQYQRRVEHEKGISPANVPAPQINQTQPVTRNKLPIPNSNLLLEDDIEPFSDIS

SEQ ID NO: 5364 - protein, 201 aa, synthetic construct
  REGION 1..201: note = TnsF-Tn7 System Protein
MDELPEFDRKVLEVLREPLESGEIHISRAARQTTYPAAFQLIAAMNPCPCGYLGHTQKTCRCTPDQIMRYQSRLSGPFLNRIDMQIEVPAVAVSDLDTLPAGESSAVVAKRVEQAFKRQIKRQGCVNARLSVKQLDAHATPDEAGRNVLAKAMTQLNWSARVYHRVLRVARTVADLAEADAVTATHVAQAIQYRRGLLGET

SEQ ID NO: 5365 - protein, 320 aa, synthetic construct
  REGION 1..320: note = TnsF-Tn7 System Protein
MSLAVINSRALLGMSAPRVTVEVHLANGLPSFNIVGLPETEVKESKDRVRAAILNSLLEFPAKRITVNLAPADLPKAGGRFDLPIALGILIASGQLKVQQLSQYEFAGELSLSGELRPIMGALAMTYGITQEALQNPQTTPIIILPQANCAEASLVSNAQIWSAKSLLEVCAKLRAPDAQESFQSPKIANERVYYALDWLDVRGQSSVKRALEVAAAGGHSVLMVGPPGTGKSMLAARLPSILPPMSETEAMESATVLSSAGQFSPEQWRVRPYRSPHHTASAVALVGGGCGFQNKLRHSRNKCDKFIKLDNSPIFDWTA

SEQ ID NO: 5366 - protein, 320 aa, synthetic construct; identical to SEQ ID NO: 5365
  REGION 1..320: note = TnsF-Tn7 System Protein

SEQ ID NO: 5367 - protein, 374 aa, synthetic construct
  REGION 1..374: note = TnsF-Tn7 System Protein
MGTTYSWHQGVVRLKSKWAVPTPLLPDEIFSSWLVRVAFANGLEPMALTGSLWAKSRLWTIDIDRHLSQSQIATIAEYSGMSQQQISKSLLPCVSDKYTTNIGTKEPAIAPWILALGSRSRKRYGGMQYCPKCLAEDEISYFRINWRFAWHTCCLKHSCVLLDRCPHCKSAIQFHKRTYQTPSMRHCAVCNGDLIENDLQVAPNLAMQLQDTADQVLLLGDSSKSVDYFLRLRMFELLVRRHLLSNHQAINKLCNLVELHSNDAFQFTPLGLAFEILSTEERLLYLDMIQTFMGLSDDTLTHHLMSAGLTQQALCPSPIVIPESLQHIFNQLPNAQRNTKQVRSSAELFEIPPPRSEKQVMRTFERLKRKIRAL

SEQ ID NO: 5368 - protein, 301 aa, synthetic construct
  REGION 1..301: note = TnsF-Tn7 System Protein
MNTTNHTERSYLHPDLLAVIDMPAQDRIRMMDSPRWIGYSRATEVMDFLQGLLIKPQRPRMPNLLLIGDSNNGKTTLIRHFVEVCGEGYVDENSEPVKPIILAEAPPTADEKALYISILERFWTPYRATDPVTKLRFQLIHLMRACHVRMLIIDELHSLLAGTAQKQREVMNALKNLCNELCIPIVGVGTSEAVRVLHTDPQHASRFEVARLPSWNLDKEFQRLLASFERILPLQQPSKLHSPELAMRLHAISEGNIGNLHRLLIECATEAINSGEERITLPIIEKNKWVQPTRGIRELFG

SEQ ID NO: 5369 - protein, 301 aa, synthetic construct; identical to SEQ ID NO: 5368
  REGION 1..301: note = TnsF-Tn7 System Protein

SEQ ID NO: 5370 - protein, 306 aa, synthetic construct
  REGION 1..306: note = TnsF-Tn7 System Protein
MMPAGRGRQCESCSWEKSFKRRVSLNVESFEHSHTRQLFSEFCQWLQAHMGAHKAALRLKRYLPFFTYVESVPIGIPSYISLLEHFNADGIRRMQVPMLWLKEGYGVEADSAMREEHSEKRRINELILSVPKGVAASALIGYRAYLSSKLAAGSTTLRSVRLSLGAAKGLLATASSSLDKLPTQKTLTTYLTQTPGQKAGAQGFISYLNRAHDSNLQMAVNDRSVSRARKVKLEKELDAMILQPDEGDAFVRTWIKTALMFFHDVARVNKKALVFDSLVLQGRDGFNVRLQTGDYWVPAPTASLRV

SEQ ID NO: 5371 - protein, 614 aa, synthetic construct
  REGION 1..614: note = TnsF-Tn7 System Protein
MNNRLIRLPLRDHLCETNDAAAIKHIKGTVVVWWYLYQRKNNDAQSVPYVDVVFRYLDNNDVPAGFTVQKIGISRLGTFRIGTIWSDGTCIHEAYFGKEMEFAVDFTWGSWSYMAVHGVPTASHDFPQVIERNDLFGDTQVENVATQVLSFPLPGDKNLLISCTEFLVRCYGRTSEMPRILATYPWPDVLTLLFADTQRDANAWVVSPSRKVHDDDALFLASILYDPYAATVAKSIYSQLDNARALGHEAVCVEAMPWFQGPAKIAVRGRWINRGTTFLCLEVTGMSQPQENPYEISRPKYTREDPEAGEVDIMPTKPAIEFPRELDPFEVTDLQEPDLNAATWNKPDPGFRIIGEHCPFKHSPKERSFSERRTVPTLPNSAGVYSTGDPQGSGKDVAKITFNAKRYVGNGGILNDVWEELKRVAAAYKGISDLAWYHEKAGFNTHDQFKLLPLASFSAEELETLSTDESNSDKTRRWLAYPTNANRMRGILVLRIVIDARSFYLFEIQRKKIRKKASVAEEQISGLLMQIDDPSEAMRVIDVVCDKIRLTRGRFSKLKMPHGHSYCVFKHFWGKDTFAAGTTLRTAFKRFLVQIEREPKPSTTGPSQASGAIS

SEQ ID NO: 5372 - protein, 306 aa, synthetic construct; identical to SEQ ID NO: 5370
  REGION 1..306: note = TnsF-Tn7 System Protein

SEQ ID NO: 5373 - protein, 222 aa, synthetic construct
  REGION 1..222: note = TnsF-Tn7 System Protein
MDRNSCNQNPFSVERRIKATHRSLSGVYAFRGVGVAFESSLERDFLHRMDFSRDVVTVGSQPVKLDFVAHNGRSYTYIPDFLVHFKSRTGRRPMLVEVKPEEAWREKWREWLPKWKAAWRYAAEREWSFHIYDESRIKGPALKNIQYIERFKRGDYSEEDMDAVVRTVLFMGSAPIHYLLALHFTGSETLGWSVLFHMIATRQLDCDISRHFDEYLEVTVTA

SEQ ID NO: 5374 - protein, 639 aa, synthetic construct
  REGION 1..639: note = TnsF-Tn7 System Protein
MSDAQEGKSSGKKIDRSLVSIIADQLVCYQKEIYRIKQVLDFHAVLGINVESGRAKVLRIAELKPVLAEKITGPYINHDLAEISTEEWATAQKRFSIIEPLLTLDGKQKGVVAKRAKEAGVDTVTVYRWLNRYKDHGEVTALIPFKRGWVKGRQRTSDEIEELIASVIKSHYLTDQRHSVASTIEEVNKQCRARKITRPNGATVRARIKKIPDRLRLIARGYKELAGNKHDARPGELVGEYPLHIVQIDHTPADIILVDDVHRLPMGRPWLTLAICIHSRMVTGYFLSMNAPSAVSVAMCLVHSILPKESWLALHGVEAEWPVWGKPITLHSDNGADFKAYSLIQSCVNHDIKREFRPRKTPHWGAHIERWMGTFAEQNKKEKGATFSNPLERKEYNSEKKSIYTFQEYEERLVRNIISYNNDFHSEIGMAPIRKWNIAFFGNHGQPAIVPLPPRVADPWAFQLDFLPASRRTINPYGVEMDAMYFAEALRPWIGAKDQKTGKARKFIFRRDPRDINRIWFYDPAVKEYFEIPITRAHYGGTTVAEYVAAKKKAVEEGRGAIDHELIDRLLDQNREQEVEAAARTKKARQSVQKRKNNAKQTTPASPQPRVEPTATLPTLPTSPGLLSIDDVDTFGDVW

SEQ ID NO: 5375 - protein, 346 aa, synthetic construct
  REGION 1..346: note = TnsF-Tn7 System Protein
MEDEIISSWLVRCALAQGCDPLTLTGSLWPEMRYWCTDPDRGAKGDQLVKLAEASGISATILEGSTLTPVQRALTGAAEFPKGVTPWILCLGMQNRRRCGGLQYCPQCFLEGAAHYRIQDRLSWHTVCSVHQVTLLDRCECCDAPLCPQMLEPPETGLTRCHRCRFELTLASTTAADMKALRFQQAADELLCGNPQMYGEEPLLISDWFYLSKWMVGVLRSAERARSLCTKGFFADFGINFDVLIAPATGLPFEYLKPEDRARLLANVWLILQAGPERFVQGAARECIAPSLFPRLPENAPACLTTLISELRALHKRAATSKKIEAPRSQKSVLMRWQRLLRKIQR

SEQ ID NO: 5376 - protein, 297 aa, synthetic construct
  REGION 1..297: note = TnsF-Tn7 System Protein
MTEYQHIHPQFRPVMDKTDLERIQFMDEARWIDYRAGSKLLDILDGLLRKPERPRMPNLLVVGASNSGKTTVISRFRESSGKPFLSHDAVSVRPVIYAEIHKPDERELYNAILDCFWAPHNPAAPLAKLRHQAMHLIREAQTRMLIIDEIHTINNGSPSKKMDLMNELKMLANTLRIPLVLVGTRTALQLLSLDPQYASRFEVVALPSWTANGEFQGFLKSFESVLPLKKASKLYSAELTTLIHAISEGITGNIEYLLRECAKEAIQSGTEVIDRRLLEKNQWMRPTSTDGTRVRTL

SEQ ID NO: 5377 - protein, 297 aa, synthetic construct; identical to SEQ ID NO: 5376
  REGION 1..297: note = TnsF-Tn7 System Protein

SEQ ID NO: 5378 - protein, 251 aa, synthetic construct
  REGION 1..251: note = TnsF-Tn7 System Protein
MLPNPTLDKLQTLRLHGMIKALGEQHATPDINDLGFDERLGLMVDRELTEREDARLTTRLKAARLRHNACLEDIDYRSPRGLDKSLILQLGSGQWLRDGLNLIIGGPTGVGKTWLACALAHKACRDGYSVRYLRLPRLMEELGLAHGDGRFAKLMAGYAKTDLLILDDWGLAPFTAPQRRDMLELLDDRYGNRSTLVTSQMPVDKWHALIGDPTLGDAILDRLVHNAYRIELKGESMRRRATKLTTTGTSD

SEQ ID NO: 5379 - protein, 251 aa, synthetic construct; identical to SEQ ID NO: 5378
  REGION 1..251: note = TnsF-Tn7 System Protein

SEQ ID NO: 5380 - protein, 320 aa, synthetic construct
  REGION 1..320: note = TnsF-Tn7 System Protein
MPAGKGRECDDCYWLRTFNARLTIDVAGFSTATMSKVFGDFGAWLLKETGPQPAALKIHRHFMFFSEMEKHWGQLATYEQLLESFGASGLRKAELPMRWLRAVGRVVVDEVAREHHTEMRRVADLLESVVEPNFKDILKRYHANLLVKVEQGGASVRSVRLALRPAVDLLHLAGSQGAAMPTQRTLEHFWHSSPGQLAAVTGFVNFLNRTFVLKLESRPDKRLMEKARRRKKEKALRLLISERQEGGAFERKWIAAALAYFHGISKVSSQRLTYVAADYKAVPGFNVTYGGDLLWVPSCDGFPSLGDGKEGPDESGHPDQ

SEQ ID NO: 5381 - protein, 392 aa, synthetic construct
  REGION 1..392: note = TnsF-Tn7 System Protein
MTMEELTKVKSDLAQVARLALSEKTDDVRLFVARLVRQYRNSEPSLAEQLDNYLRTIAPSGSSTFMRRENPSTKTEGSAHAPVDDESRLSLLKIFNDGPEYPAPLLAASVVDPLAQLIKERKQIKKLAALGLHPTKSSVFVGAPGVGKTITARWIAAQLGVPLFVLDLTTVMSSLLGKSGANIRAALDYAKRTPSVLFLDEIDAIAKRRSDESDIGELKRLVTVILQEVDEWPSTGLLLAATNHPELIDPALWRRFDLIVEFKSPDAQTVEIAIRRFLGPDLHKFEKWIEILSYAFQNQSFSDIEREIQRFRRTLALGGGSPQKLIEDLAGQKAAALGRVELIEFAVLLDSQTSLSQRAIHEITGVSRDTIRKHRKAETAPAKRASRTRTTA

SEQ ID NO: 5382 - protein, 392 aa, synthetic construct; identical to SEQ ID NO: 5381
  REGION 1..392: note = TnsF-Tn7 System Protein

SEQ ID NO: 5383 - protein, 578 aa, synthetic construct
  REGION 1..578: note = TnsF-Tn7 System Protein
MLGPIKRVEFSYPRADFRENAGVKALTGDVIVWWYGPVQQNGKKRTVPHVIALFRELDANDRPGDFKQVKIPLSHLSYYRIGTIWRQGKCVSDTELTRIDASKVDFTELTGWRYTSRYEARKQRLPQTFRNTDYPLLYQDGDKCWLLDFDLGDGKNMLVPCVEFLVRAYARNSEVCRALTALPWNDVFSAFYDTPNPDEHEWIIRPSRHMRDGDAVYLAHLMYDPYTAHQSRLVNSQVLSSGPEKPVLLKVAPWFKGPAQIEGRGLWINGGNTFLCLDITGCSEPPGDEIVLQRLNFDTDQGIDGTGRTVMPRPVRTALADEFIAAVDQLDPDYHSETTIVKTAPFKTLGSQRKIKKSPHTVKANTGRRGPNPPDANTHSTGKGTGSGKQTGKLLLEADAVLESRGVLRDVWRALHDIAATNQQVTDLHWYTPSERFKADGEPKLIALDPHDHQTGKPISWAYLDTITKQPRGVMIVRIKIASDRYFLIELQRRQKGDEEIESFAGVLFPSHLNNYEELQDFVEEFCSVIRFKNGVVRNLKHLFPDKAKFFNHSPHEERILHRTVLINAFRDVGVSLT

SEQ ID NO: 5384 - protein, 320 aa, synthetic construct; identical to SEQ ID NO: 5380
  REGION 1..320: note = TnsF-Tn7 System Protein

SEQ ID NO: 5385 - protein, 181 aa, synthetic construct
  REGION 1..181: note = TnsF-Tn7 System Protein
MRFSSGVSAVIPQPVEIEFIAPNGRPHTYTPDYLVYYRLGDRHYADHIMPMLVEVKPAHLWRERWRDWSCKWKAARRYAVDRGWRFCIYDESRIRGLALQNIVHLERYERMAFDPEDIDLVIKTLREMEIAPVHYLLARHFNGIYRSTGISLLWHLVATRKLDCDIREPLNENLELWVATQ

SEQ ID NO: 5386 - protein, 640 aa, synthetic construct
  REGION 1..640: note = TnsF-Tn7 System Protein
MNIYDINTDEHLIPFEPSRARVDIQVGAMVRRENQIFRILQILNFEVVIGVEVESGQSASLRISELHSVEQEKVDGLYVNYDIATIGSDEWAVAQQRFAVISPLLNQSVTPRSSVEAQAKLAGVDTATVYRWLDRYQNWGEVLALVPRKRGWKSGNTRLTTQGERLVEEVIEEHYLSKQRPSIQSAIAEVDRRAKALGMKPPGASAIRARIARISEKQFLRRRGFADKARNRFTPAVGKFPGADYPLSVVQIDHTPVDLIVVDDVHRRPIGRLWLTVAIDVFSRMITGYYLALEEPSEISVAMCIAHSVLPKEEWLDVHGVRGQWPVWGFPRVIHSDNGADFHTANLKRSCSNYNIENVFRPVARPNFGGHIERLLGTFMRTLHELPGTTFSGIAAREGYDSEKNAALTMAEFEMWLVRSILKYHQDIHSAIYMSPARMWQIGFFGNRETDALVGVQPRPADPLTVQLDFLPSFQRTVQHYGVQIDVFYYSEALRHWINATDLQTGQARKFVFRRDPRDISTIWFFDPVLKQYFKIPVANQAFPASTVWEFKAAKKKAVSEGREHVDEALIARLILENRELVEQASANTKKARKQAQKTRVHEKRVTPATVVAMPKPSPAIAAGLDDLLLDDVDLFGDIS

SEQ ID NO: 5387 - protein, 369 aa, synthetic construct
  REGION 1..369: note = TnsF-Tn7 System Protein
MAASYTWHPRVDGIDPKWPIPQSLMADELFSSFLIRSALAHGCSPIALTSVIWPAQRVWTLDLDRGPAPNNLEVLSRLSGISVPVLQSSTLQPAAHCILNLSSPHFGVWPWVLVLGCRNRRHAGGLQCCPLCMGQPNPFYRIQWRLAWHTRCSLHRTRLIDCCPTCQAALHPSLLQQGGSIAYCHFCKSPLTRSVQADVSEGAAAFQHYVDDMVWSGTWYGHLQLSCCEWLGVARAMLSLVRSASGATPHAQEVFCEVMGTSVLPEPAHLGLPFEYLSVGERERLLEVVWSIMRAGPARFLEAASAVFPPSALRSFAKGAPRLMALVPSKLTSRHCTINRKVTMAGTQKPQAVLRSWLRLIRKIKRDGL

SEQ ID NO: 5388 - protein, 296 aa, synthetic construct
  REGION 1..296: note = TnsF-Tn7 System Protein
MSDYKHLLPDFWPVLQLSDRERALFMDQPRWIGYPAAHSVLDTLGQLLDMPKRPRMRNLLITGESNNGKTTIIRHFVEKHGEGYVNENAEPVRPIILAEAPPSADEKGLYVALLDRLWTPYRTTDSVLTLRYQVLHMFRELHVKMLVIDEIHSLLTGSAIKQREVMNAIKMICNELVIPVVVLGTEDAVRVLHHDPQHSSRFDVMKLGSWKLNADFQRLLKAFEAVIPLKRPSEIYKAETAQLIHSISGGNIGNVHRLLIECARDAIASGQEHIDRELIESKSWLRPTRGIRELMG

SEQ ID NO: 5389 - protein, 296 aa, synthetic construct; identical to SEQ ID NO: 5388
  REGION 1..296: note = TnsF-Tn7 System Protein

SEQ ID NO: 5390 - protein, 390 aa, synthetic construct
  REGION 1..390: note = TnsF-Tn7 System Protein
MLVRFISGKRKSVLFAEKKLSEPPVWGKAVRALGFAQVAMARREAMPAAPNAVDTGCYRKQSMEPCAKKCATEGYTNCTICHAQIPAGKGKKCDDCAWAERLTHRVNLLKVSVRKGAVRDAFPAFALWLAQDVGNDKAAMTIERYAPFFRVAAQQWPSLPDFPTILSHFKPKGMRRYLKVKQWLEQLPNQKTDKQLALDLAEQDRIEVLRGKLAGNAVAESLFESYYDKLLAKHHAGKTSVRSVRLAVQPVVGLMQGLSRFPVQADIDAYLRKKAGQRAALTGFISHLRREYALDLQVGKATEKGRERMKVAKRNALEKRVIAYVVRCYKHPDAFRLYDWLRLALPYFHWREICREYTVTERPDGYMVSQAGEEMFVPALKGEFSFMKKD

SEQ ID NO: 5391 - protein, 390 aa, synthetic construct; identical to SEQ ID NO: 5390
  REGION 1..390: note = TnsF-Tn7 System Protein

SEQ ID NO: 5392 - protein, 178 aa, synthetic construct
  REGION 1..178: note = TnsF-Tn7 System Protein
MERDFIILQEFDCSVVKVVAQPIKIPFLLKGRNYQYTPDFLVLFEQGCPKQGMLVEVKPESEWRSHWRSWLPKWKAAYRWAVERDFLFRIYDESRIRGQRLANIKTLSRFLDKQPDDALTGLIADFVGDGMVSMGNILSHFSTFPACGSEVYRMLANRGLFCDLDDPLSADTLIWRKK

SEQ ID NO: 5393 - protein, 633 aa, synthetic construct
  REGION 1..633: note = TnsF-Tn7 System Protein
MTDSDKQKKAASRGKLSLSVNEYVRHIPTDRQYRISKLIDHTYILAADENGQEKVLKIEELGLPKTNIAPYAGDLDQLEDEIWEEAKYRYELIQPLLKDEITGRTAIEAYAKEKGVGYSSLYRWLRAYKANNSISSLISRQRGWLEGASRLDKETEKIIQEAIQKYYLSEQRLSPIKVIQQIRVLCHQRGIKPPADNSIRKRMNELSEKEVLRRRGYKEKAKNKFQPKPGHFPDVSYPLDVIQIDHTPMDIILVDDKTRQAIGRPWLTVAIDVYSRMICGYYLSLDAPSEISVAMCIAHCVLPKEEWLSAKGVNGEWKVWGLPKKIHVDNGMDFRTETLKRACLEYGITLEYRPVRVPNYGGHIERLIGTLMRESHQLAGTTFSNVKEKDNYKSVDKASFTFDELEEWLLNLIVNVYHKRIHRGIEMRPEDKWDLGIFGNGREYIGCGLPNIPVDKERLMLDFMPFTHRTIQANGVTWDGVRYFDFCLAPFIGKSENGKSCEYLFRRDPRNVAVIYFFNPNSESYVGIPAADQKFPRTSVWQLRETKKRLRELGRKNYNEHQLIEAIQQMSRLEESAKKETLKARRKRQRNVLHDRQITPIQPDVSRNPPPVAEITVPDLAVQAEIKPFEDIE

SEQ ID NO: 5394 - protein, 351 aa, synthetic construct; identical to SEQ ID NO: 4196
  REGION 1..351: note = TnsF-Tn7 System Protein

SEQ ID NO: 5395 - protein, 293 aa, synthetic construct; identical to SEQ ID NO: 4198
  REGION 1..293: note = TnsF-Tn7 System Protein

SEQ ID NO: 5396 - protein, 293 aa, synthetic construct; identical to SEQ ID NO: 4198
  REGION 1..293: note = TnsF-Tn7 System Protein

SEQ ID NO: 5397 - protein, 636 aa, synthetic construct
  REGION 1..636: note = TnsF-Tn7 System Protein
MPKLVGELIYAAIEAGIDGLVSPGCALCGRPRTLFHNHGDGQRICTTCYSRLRVATCSNCGRDGQRIKVHDDEGRPVCARCHERAQAPDLCAGCGKLRRLKRSSVDGLSYCRGCQARRAPTERCSICGQDSRVNARATDGGAVCTTCYTKTRTATDVCDECGTIGPLNARADGRSGAGKNLCGRCYRHPKRGCGICGRVRRVALRATDTSPDICPTCYQAPVIDCSVCGQSGLGRRATKNGKPWCFACQATEYVDSLLATADGAMPPKLKDVRDVLVARAGAPSLVSNWRSTQSLRLLARLAEQPDAINHKTLDEEGNRFSAHYLRALLVATGVLPERDEQAARLDRWVTELLAGVEDLNQRKILTRYARWHVIARARPDRHGQLRPAVADRCRQEIRMAQRFLIHLDERGANLAHCRQMDIDSWITGRQGMKVRFLNWLQADGELAEVNLPVLAGPQGPGATIDQDQQWALVRRMLHDPTSASIEDRAAACLVLLYAQHVTTIVALTVDDIELTSSGTYLNLGTEPVELLPDVADLITALPIAKPFGAARTLADPKWPFPGKRAGHHQHSKSLMGRLNRLGIITRASRNTAMLHLAATVPPAVFASLVGIDVGTATRWAEHAGGNWTRYAAERSR

SEQ ID NO: 5398 - protein, 636 aa, synthetic construct; identical to SEQ ID NO: 5397
  REGION 1..636: note = TnsF-Tn7 System Protein

SEQ ID NO: 5399 - protein, 265 aa, synthetic construct
  REGION 1..265: note = TnsF-Tn7 System Protein
MTHRHTQGDGVVAVRDGAVAIAGRPILRGIDLDVRRGEFVALLGPNGSGKSTLIRALTGLRPTAGGSVSLFGTPLAKFHDWPRVGFVPQRPSAASGVPTSVWEVVASGRLTRRRLFRPLLRHDRAAIRDALDVVGLADRARDGVSTLSGGQQQRVLIARALAGEPELLFLDEPTAGVDRANQEALADALGLLSRRGATIILVAHELGPLEPLVDRVVMMRDGRIVYDGPPAGRDHAHPDHGHHHDAPRPDHLPQVSGPLDSPGAR

SEQ ID NO: 5400 - protein, 265 aa, synthetic construct; identical to SEQ ID NO: 5399
  REGION 1..265: note = TnsF-Tn7 System Protein

SEQ ID NO: 5401 - protein, 343 aa, synthetic construct
  REGION 1..343: note = TnsF-Tn7 System Protein
MLAGWAGQQSSRLLASVTIRARERSVRRFVEFCGTYPWDWTPADVEEWTTQLLSAPRPLAPSSIRGYQNAVELFCTYLTDRRYDWAEQCIALFGTHPTQVCHEWNTAVHVSDHEANPAVRPLTRDELQQFFDYADHRVERARARKRKGWKSVFRDATLFKMIYAFGLRRREVAMLDLHDFTRNPDATEFGRYGVCNVRWGKASRGSQPRRRAVLAVLDWTRPVLEEYVTDVLPMFDLADRAMLWPTERQSRVTGHHIGLRFAEYRDELGLDPALHPHCLRHSYVTHLIEEGFDPLFVQQQVGHRWGSTTALYTGVSGDYRNRVLRRALDQAIQAPDSEEGSTP

SEQ ID NO: 5402 - protein, 118 aa, synthetic construct
  REGION 1..118: note = TnsF-Tn7 System Protein
MTKSGTKTVAYRWHLRKVMADHGMHSTTKLVPLLADRGVVMTSTQVYRIVTGEPERLNMQFLAALCDIFDCTPNDLIEPYVASSSTRGRKAAAGAVKAPGKPGGKNRPTRAVIKSADS

SEQ ID NO: 5403 - protein, 313 aa, synthetic construct
  REGION 1..313: note = TnsF-Tn7 System Protein
MPAGRGSECEDCTWEKSFNRRVRIHIETFDNAITRERFSEFCQWLREQMGHHKAAVKLKKYVLFFSFLDAHSLGLPSYFSLLDHFSAEGLRCMQTPMLWLKTRYGVEADDVLREEHSDKRRIEEILASVPAGVGAETLGGYRAYLLSKQGEGGTTIRSVRLSLRAAKSMLAAASPAFDALPTQKTVSAYLAQTPGQRAGSQGFISYLNRTRSLNLKVEVSERSIARAKKHRLETALYSMYSTGGEGEAFERTWIKTALMLLHGVSSVNKKSFSYSLFTVQGKAGFNVVLREETYWVPGPTCRPYFMSESTAPS

SEQ ID NO: 5404 - protein, 585 aa, synthetic construct
  REGION 1..585: note = TnsF-Tn7 System Protein
MHQRIKRIPPRNNLCTTDDGEAIRHIRNGTVVVWWYERIKKNFNAESIPYVDVIFRYLDPNDEPAGVTSAQIGVSRLGSFRLGTIWKNGKCIAETDLGDDQIFSVDFTEGAWSFLNVHGNQQKHPFFKKDYPLRTQPTGDVLSTLISFPVPGGELLVPSVEFLYRCYGSTSDMARVLTTYSWDEVVEKLYADTEKDPTTWLVQPSPDIPDDDALFLASVRYDAYAENAAKLIYAQLDNAHGRNLKETSLEVKPWFQGPARLRVRGRWINDHKTFLCFEVTGMSQPLDRSYEIRRDKYSRHDPEHSLILTDILKAKLDLPKEEDPFAITDLQEPDQGSSRWSNPDPEFRVLEPKCPFTTSFVERSFSKRNVVPVEPNVPQKRSTGEPQGYNKSVGKITAVAKRVLGDGGILQAMWEELTRLKKGNRSFSSLAWQSEQEGFVHNANFRLLSLPAFADTDAPKDKNRSWLVYTANTTRRRGILVARMEINRRSFYLLELQRKKLRKKNVYSEEGISGLLMEISNDSEAALEISRICNEIRFASGNFRNLKTAIAAPHWIFRHLPSTSSTLYHAFEHMGVRLDFGSTDD

SEQ ID NO: 5405 - protein, 313 aa, synthetic construct; identical to SEQ ID NO: 5403
  REGION 1..313: note = TnsF-Tn7 System Protein

SEQ ID NO: 5406 - protein, 222 aa, synthetic construct
  REGION 1..222: note = TnsF-Tn7 System Protein
MDINSCNQPKFSVARRIKSTTRSLSGVFAFRGQGVAFESMLERDFLSRMDFRKDVLTVISQPVQLEFVARSGRTYTFTPDYLVHFHSSSHLRPMLVEVKPQENWRENWRELLPKWKAGWRYAKERGWRFHIYDESRIRGQSLKNIQYLERFRNADYADQDLDAIIRTVAFKGIVSVEYLVALHFQGAEALGKSHIFHLIATRQLDCDISGPLRDSLEVTVAE

SEQ ID NO: 5407 - protein, 639 aa, synthetic construct
  REGION 1..639: note = TnsF-Tn7 System Protein
MNQVVNDKPQGVKIDRSFVNIAPGEPACYLKEVFRITQVLDFQSVLAINVETGRPQVLRVADLKPFLGDKVKGPYADYDLEDIGVEEWAIAQKRYAVIAPLLGIEGQSRSVVEERAKEAAVDAVTVYRWLRRYKEHGEVTALIPLKRGWGKGRPRISEGVEDVIAKTIEEYYLTEQRPDVTSTVYEVRKRCKAQGLLLPTVSTVQARIKKIPDRIRLRKRGDKELAGIKYDARPGALNTEYPLQIVQIDHTPADMIIVDDVHRRPIGRPWLTLAICVYSRMVTGYYLSMDAPSAVSVAMCVVHSILPKEKWLALHGVDAEWPVWGKMATLHSDNGADFRTNSLIQACINHHIRREFRPKKNPQWGGHIERLMGTFAGINKKDRGATFSNPGERRQYDSEKNSIYTFEEYEQRLVRNIIKYNNHYHEEIDMAPIRKWNLGFFGDKEHDPLVPLPPRVADPWGFQLDFLPSALRNIHPYGVELDAMYFAEALRPWINATDPKTGKARKFIFRRDPRDINRIWFYDPALKEHFEVPIVRGRYAGVTVGEYVAAKRKARKEGRDALNHEVIERMLDENRQQETEAAERTKSARRSAQKRTNNSKQTTPARPTPHVEPKVPTAAVPASPELLSVDDVDTFGEVW

SEQ ID NO: 5408 - protein, 669 aa, synthetic construct
  REGION 1..669: note = TnsF-Tn7 System Protein
MPAIADAFLKNRADNLPPDVSQEFIVPPFFQHISIFKDSKSVRVLGGRGCGKTMFLRYFCHGSTFSSHRAEIGDDEFSHIGLYFRPDTGFCSLITPEWLGNQQDGVAFSHYLTLCLLAEVSQALRNINDAVNLMSGPLPLSDIKLGPKLVRLLQLTEPTVDALADLVDARLAELDLWVRNPGRCDTPIFVHFTTIITALADDIAKHSPRLKALAFRVFIDEFENLLPRHREIVCDAIKHPGPRMAVHIAHKREAVSDFKTSGEERVVEMHDIRTIDIEALLVNDNDFEVLAAELFLFRLRQAEVSVSCPAFKPELLHDIVHLSYRSTQSYRQDVVAYTKQIFPEKRAPEIARLALEDPALRRRVVEMIKKGLEFQGLAGVFNAEDLISEGVPEASVVLGAILNRKSQSGKEAVGLFQEVANKGKSKTDAFYKMGGWVDNNLYGCLFHLYAGLPKRPNILYAGFSRFCKIAAPNLRFFQELCHNALLQAYQRRSAEEIGEALYIDLNTQATAAVHVSDAMFEDVLQLGPHGDRLLDFARRLGGLFEAYNKRRSQSEPEINHFSINRADTAQLSDAAQRILREAKIWSVLAESKGTKDKAEYDVTQYELVLNPIYAPHFKISYRKRRKITLTASQLDVMLTHSDSQFEALVRQLVDSQDDEETAKKTGSLF

SEQ ID NO: 5409 - protein, 669 aa, synthetic construct; identical to SEQ ID NO: 5408
  REGION 1..669: note = TnsF-Tn7 System Protein

SEQ ID NO: 5410 - protein, 283 aa, synthetic construct
  REGION 1..283: note = TnsF-Tn7 System Protein
MYKSDLDRIDFLDVARWVDYKAANTLKDILDGLLCKPERPRMPNLMLVGESNSGKTTVITRLLDSSGQPFISDDAVSVRPVIYVEVHKPDERELYNAILRAFWAPHNPVAPLEKLRHQAIHLLRNARTRMLILDEVHTINNGSSIKRMDVMNELKMLSNVLHIPLVLVGTRTALQLLTLDSQYSSRFEVVSLPNWSVNADFQRFLKSFESVLPLKRASKLYSPELTTLIHAISNGNTGNIEYLLRECAREAIRTGAEVIDRQLLEKNQWMRPTSADGVRERVL

SEQ ID NO: 5411 - protein, 283 aa, synthetic construct; identical to SEQ ID NO: 5410
  REGION 1..283: note = TnsF-Tn7 System Protein

SEQ ID NO: 5412 - protein, 390 aa, synthetic construct
  REGION 1..390: note = TnsF-Tn7 System Protein
MKIQQCSKCKDYKKYVFNRTLENNTKSLLCNTCFRKCLDICSLCGRHTITYSYTSDNQPMCKKCTCQPFRVCKQCSKKFPAGRGRVCEECSYYNTLIKKISVLNLLLSKYTNGLFEEFTWWLHKKRGSIFTTASIQKYFIYFYKFDYIANNLSRFPNYQEILNFFLKEKISKSLLITKFLVQKKIIIIDDKYKELFSNLHIIDNYISYFKPYTYEYTLLNTYHKYLINKYIQGQTTIHSVRLALTPAFKVLQYKQHFKSCILNDSIINGYLWIYPGQMNALVGFSNFVNQHHKGNLHQIQSKKLLLQRSKTKKDILQINLINLLKKESLTAFEKNRVLRTSIEYFHRVYVPKNVYLGINNISKVGDLYHICCCYHKFYVPEQLYYKLLSI

SEQ ID NO: 5413 - protein, 977 aa, synthetic construct
  REGION 1..977: note = TnsF-Tn7 System Protein
MSQFLKKLICEEENLFLEYKSQWYWKENEKPTPNEWGEFLKDFSALVNCSEEYIEESKYLIIGIDENQKEIENRVIDVKFLQDSKYSDLVFFKNEVVKKINSFFRTDSDEEIVYNDFSISTFIIDNKKVLVFELLPTKNLLILDKDLMDKNRTEKRNNVFIRELKKINDPQVANASPEILGKLQNAITAYKVKKNKEEKKDRSIEKTINLFIQNNDIYELETPIKEKIWSENIHFELYPVKSAFHNIDFIYIYDRTSQQKTYNYLLREGLLADNAQKWIIIDNGLKKDINGILTKFKADKVYSLDEFAYEHLYKKYFEDSVYHDGKFKAQEQIKNFVEPYTSKSNEKNAFLILSEWYNQVSKPLMVIKGYGGIGKTTLVKYFLDDLFSHNSDNEVNSKILFIDSKEILDEISKQNTVNNIYDFYDALAKQKNIEKKLGKELLELSVDNGNLLIVLDGIDEVIAKLVSRFDIENFINTIYNNYSLGNEKTKIIITCRDYFWNSNIASSYKIDTLELEAFTRELAEKFFRKQFTETSKELEKCLKYADEFALSEEDKDIYIPYILDVIMDMVKQQKELGSVNRGDIETDLLNTEITNDYFIGRMCNREIAKLENLSIDLQLQVFINMAINFNGVVSHESRKKLFTNVQTTFSESLVKKFKGHPLISYQNETMTFRYDFFREFFINLYISKFFTIRDSMVLQDDFKEIMIEYIKYDNSFTEYISRRIKFDDEFQLFTISILEDLIEELKKEELLETRSLISSILILLLVSLRESNQKNDIVAKTELLVNIFGQNLEFLTLINLFGADKNNYPIFNFEGKTIKNAWFENYEYFWECKYDENTSFEDSTFKYLEPRKQISLPKIHEKLFKDCDISGIEKIIQSEKSKHETKTKQIKNNLLKIFRHFEQSGTFKEKKIDDTRKKCNTVILDKLIYNNVIEVYKNPSRPTLKQYRVLDEYHNIVKVLSQEGSCLEFEKVLQFIE

SEQ ID NO: 5414 - protein, 977 aa, synthetic construct; identical to SEQ ID NO: 5413
  REGION 1..977: note = TnsF-Tn7 System Protein

SEQ ID NO: 5415 - protein, 365 aa, synthetic construct
  REGION 1..365: note = TnsF-Tn7 System Protein
MKQLKCACIEGLDATSVDVEATFTKGLPSFSIVGLATNSIQESRDRIKSALLTNEFTFPPKKITINLSPSEISKSGSHFDLPIALLVALNDVKCSLDGFYVFGEVGLDGKLKDTHSIFVLILSLAQQGLLKKVLIPKASVEKISKIPNIEIYAVDTLSQACDFFKFDSKEQSRVINSEFSYKKMTINKKSYYYDTQYVYDFKEVKGQQTAKRAALIAAAGNHNILFEGSPGCGKSMITKRLQYIMPPMSLEEILEKAKLDSLDAIEPSFHPIRVFRSPHHTATKASIFGGGTQSAKMGEVALSNNGILFFDELPHFGKTILEAMREPLEDHRLLISRVNSKIHYETKFLFVCALNPCPCVISNYK

SEQ ID NO: 5416 - protein, 365 aa, synthetic construct; identical to SEQ ID NO: 5415
  REGION 1..365: note = TnsF-Tn7 System Protein

SEQ ID NO: 5417 - protein, 662 aa, synthetic construct
  REGION 1..662: note = TnsF-Tn7 System Protein
MKTNDDVTITRLPDNDFVYVVVNFGVAAKQKLKSEVPNIQVILRKVDLINNKYVVKKEDDILAYIALHELDAVRIGTLWKRKKRVKDVYWQDYGNLNYSTDTRFSFNFQQYNPTTITYEQNITELNDSSLANIYINNLPESNSTDINKIKLLRKTKYTKLIDSNHKTILIPCMELFVSTYTPESKTIKEMLLKFDVDTALDKYLKPSECLIDGGDYVLSLNESSKGLFGDRNLRFIAYMKLNSISRQRVSKLWSSLEFDEGDIIDKAPVRYPEVLPYHPNTLLIESDGLWLNENVFLVLRINNRSLPKDFDVSVKYDNISVNILEDHLKESGRENEDINNDEEEISPDAETVDVSNPLTPEEVPGINSEDLNLDSNEEPTKRVFKQRVYSEVGVIGEEPKTSHIVNNKHYEITKGTLDERKGKKKAKPSFEFDKTGDNSSEINDEPSDNVPQDLSSAEDSSNDTKDVKKFYVEEKNFSPETQALFESVIEALERLQKKYKDFNYYFVDKEFEDKTSFTESKTSFYETLVPKKNDSWYRLKVRDKEKGGHKNHGFRAYLLIHIIVKGKHYYLLEIGKKDGESYSGLVFQSGNDMKVSIVILKELLQAVVQNKGAYSKADPKSTDKKVLKPVKLGVEYVTYKHTIKEKKYIRLYGKIKNKLNLD

SEQ ID NO: 5418 - protein, 232 aa, synthetic construct
  REGION 1..232: note = TnsF-Tn7 System Protein
MKIPLNRRKIGYTYGSTSGTYSFRSEKSIQFESLLEKKFLTTLEFNDIVLDVISQPLVIDYITANGNKSTYSPDFLVFFKDTNNIQRPPIKPLLVEVKPSNKLIENKDTLKLKFKAAIKFCNEVDYRFKIFNENRIESTQLKNIVFLNRYKEFRADLDYIELIKNHLLAVGHTTVEHLLTHLYVTDLQKSIALSHIWFLLHTKVILTDLNVLLNNNTVIWLNIEEENLGVEI

SEQ ID NO: 5419 - protein, 632 aa, synthetic construct
  REGION 1..632: note = TnsF-Tn7 System Protein
MSSQNQSNHKISREKLNLAIGEFVKYDSKTFKITQLIDFNEVIGIDIHTNEAKRLLIEHIKPLPKDSIKDNGYIHKDVNDIADDDWKKIEERLIAIRPILNGDTRAEIEQHAEEIGIHFTTLYRWHRGYKSTGTVTGLLSQKRGRKKDTVFIEQDIEDIIQETIKNDYLTVHKPSIKSIINTIKIKCLERNLTFPSNNTIRNRINKLSQYELLEKRKNKASARDKFAPAPKHYKADYPLQVVQIDHTLVDLQIVDDEERTAIGRPWITLAIDVYSRMIVGYYLSLDAPSGVSVGMCIVNSILKKDKLLNDFNIEEEWNVWGQIDNIATDNGADFRSFSVEQACLANGIHIEFRPIGKKEYGGHIERLIGTTMTEVHDIPGSPKSNIQQKGSYDSEKYACMTFSEFERWLLLYITKIYQHNYHSGIDSTPFEQWKKGILGSSECPGIGYPQLPVDETSLTLDFLPTIERSVQKNGVTIDGLNYFHPVLRTKIRGYDQGLKLKKEDSQYIFKRDPRDISTIWFYDNLQQEYHEIPLANTEIPRMSLQELNMIKANISKVNNQVLNERNIILGYKELYDHVKESVRKTKKQKKFIQKVKNNIKLTQNIQDIKQVKKSTRTRQSHDFWDEEIPDFD

SEQ ID NO: 5420 - protein, 357 aa, synthetic construct
  REGION 1..357: note = TnsF-Tn7 System Protein
MLPVKLIPHEHELISSWLIRLSFANGISLRRLSQLIFDNSSLIQKDIDKYLNKDTINKISQVTEIPKNHIYTLTLQYSISNIYYQQPITQSKWSWVIPTGGKYILKTHGLQFCPECLYDKGIMFSHFSRLSWNICCEKHKRLLHSKCPKCNHPYAPQLIEPNYELSLCIYCGFDLSTIEDSLCISSEAIELQQFLNQCFLTNKIPSSKYQILDKSIKEVFYTVRVIVQFLYRIRNKTSLLQNLKDELHIKFLTYNFQTEPKPLDTLSSQKRMVLMHNVSLLLKQPILNVEKCLLSQRITYRQLFGSNNSIPHSQTIKFLCKSLKIRTANQPTKQPTIIKPKSKEEVDTLMYHIEEYL

SEQ ID NO: 5421 - protein, 148 aa, synthetic construct
  REGION 1..148: note = TnsF-Tn7 System Protein
MSPCGNLLSTHKECRCSDVEVNRYKGRLSEPFLDRIDLYVTMTDVNKNDRSDVSSLEFHEQVLKAFKMQKQRAQESLNGKLEDEILNRYCILNEESQMVLDKAIVNLNLSFRSINKVKKVARTIADLEQSETIQRIHLMEALSYRKRA

SEQ ID NO: 5422 - protein, 301 aa, synthetic construct
  REGION 1..301: note = TnsF-Tn7 System Protein
MQINYEHIHPDFQHLMSLSKEERTYSLDQDFMIYYPKAKEVIQVMSNFMNKPKKNRMQNLLLIGDPNMGKTTIAKKFYAMNPNKKMETLDGTTTLKPVIYVNIQGSSEKEFYTSILDQFWAPYRVSHSTLKLKQQAIHLLKICQVKTIIFDELHNLLRGTPTKQCTILDQIKNLSNELMIPMIGVGTKAAATLLYNDPQLVSRFDIIKLNKWDLNQEFRGLLQSFEKRLPLKKPSFLASKEKAVLLYELCQGNLGYLHQVLIACAEYAIEKDIEEITQEIIETIMDKKLAQITNPKDYATS

SEQ ID NO: 5423 - protein, 301 aa, synthetic construct; identical to SEQ ID NO: 5422
  REGION 1..301: note = TnsF-Tn7 System Protein

SEQ ID NO: 5424 - protein, 293 aa, synthetic construct
  REGION 1..293: note = TnsF-Tn7 System Protein
MTKCGYVSVVGRPNAGKSSLLNWLVGEKIAMVSHKANATRKRANIIVMHNDDQIVFVDTPGIHETEKLLNQFMLDEALKAMGDCDLILFLAPVTDKVQHYEDFLVKNKKNTKHILLLTKIDFVSNQELLDKMKEYEKYRDKYESIIPVSIKKGTKHSDILDSVVKELPEHPYLFDPEILTTEHLRDIYKEFIRESIFENISDEIPYETDVLINKVEEKPNVDVIKATIIVQKSTQKGMIIGKGAAAIKRIGKDARTKIEKLSGKKVYLELFVSIKKGWTKNKQGLKELGYDVD

SEQ ID NO: 5425 - protein, 293 aa, synthetic construct; identical to SEQ ID NO: 5424
  REGION 1..293: note = TnsF-Tn7 System Protein

SEQ ID NO: 5426 - protein, 956 aa, synthetic construct
  REGION 1..956: note = TnsF-Tn7 System Protein
MFENRTRLWPAHPKPRSDELLSSWLVRLANANRVPLHTFCRLEWPEKPIWTRDIDGSADTELLTGLAQRTGTPFADVFGTTLRAYEGVLYERYNPNGATPWILPLGVYHRIRRRPGQQFCSKCLAETGYFRRAWRLAFATVCLKHGDWLHDCCPECGKPVNFHRTSAKRLELFQCSFCAADLSQPGKSPADPERLERAVPFQSFISQAINNRQAILQDGTTVPSRLLMPVLRQLVYLLASGKGKRLASTVSLASGLQYDQRLIYTRREYERFGLTERTNLISMAVWLLHDWPRRFIDICKDSGTWSSPLLAISGEDLPSWYEKVVVQVLSQKGYSERDRDLRAINKGLGRSNCNAERRIARQRTGTAKRPRLTAILPKGARIPYTPALQEAEARLFEISFATWVRHRRYKKKHTAKSLNRDLGAIMLIVDFTREPPWRWTEELFDQWAEYLAFGCHLTPSSQSTYFGAVQSYLEFFAKHRELQRFVRTECGHKVRQVCFRRNRIPFAADLECAPPAPKFVRTDIQSPPAADVPQKEPPAPSADEAKLTTCERVNPTGGRKKCSECSRPMRKATAVFDDRGFCAACYKRLFDRIACKGCGKTTRVFRGADKEKHLCRTCRTHGRQCLRCGKPVPRARLTLKEGVACPSCAKHFKPAKACSNCGRLSRQLARCRRLGFTEPVCDSCRRSENVTCAGCGKYRRPAGENPEGRKVCKRCFEREGKPFLCPECGREGKPHSASRCTECYWRSRIAQYRVKGNGLRNPRIREAFFDFVDEQSAAFSLHATALRLPRDLNFFSELDIRFPETRQITADALMGAVSPKWLTRHRAPYRFLEDRKLLPPRKSEELRNSQSRLILQDLWKRIDSDWHKKLVREFIDSLEKRNARCLARGRRELQLTPQTVSASLRAAIKLLEDLDRKGINQELDALRYLKRESPMKETAYQCASLSFIRFFLEKAS

SEQ ID NO: 5427 - protein, 214 aa, synthetic construct
  REGION 1..214: note = TnsF-Tn7 System Protein
MPVRRIPKNYRHVTGMLGSSRSERKPFYESPLERDFFILLDFDPRVASFEEQPVAVHYQDDMGTWRRYTPDVLVLYKEEAHKRPLLFEIKPREVLRSEWKSLERRFRAAYQVAKARGWGFRTVTDREIRTPRLENIKFLRGYRDTPADEEACELMVQTVTSKQAITVQGLLDTLATDRWEQARLIPSVWHLTATGRLQVDMDIPLTMVSTLTSP

SEQ ID NO: 5428 - protein, 633 aa, synthetic construct
  REGION 1..633: note = TnsF-Tn7 System Protein
MASLDLKPGSEVSYRGKNHRILRPVDLSSVLALEIQTGEKRTVPVAELTPRATDQPQTLPEAADLAALSEKEWEIAKERYETIKPLLDAENRTEAMVDEAAGEAGVHTVTLYRWIQRFESTGKVSALVRVPRSGGRGRSRLSPDVETVLVATIEEDYLRAEKPNIEHTAEEVERRCRNAGLKAPHPNTVRNRIKLISEKEKVKRRKGPKAARIFEPLKGRYPDAHWPLSVIQIDHTKLDVILVDDIHRLPIGRPWITIAIDVFSRMVTGFYIAFEPPSAMSVGLCLAHSILPKDEWLSDHDINTPWPIWGLMRKVHADNAREFRGTMLSKACSEYGIDLEWRPVKKPQYGAHIERLLGTLNNRIHGLPGTTSSNTKSRGDYPAEQKAVFTLNEFEAWLGILIVEAYHQREHSQLLTSPVGKFEQGIFGTGDTPGCGLPDRIIDEDRLRIDLMPYEIRTVQPYGLLIDDIHYFSDVLRPWVHATDPENDNQKRKFVIRRDPRDISQVYFYDPELNQHFLIPYRDNSRPAITLWELREVRRRLKEEGRKHIDENAIFEAYNRMKEIEQNATRETKKVRRANQRQRSAKRQPKPKAPVSRFEVPSAKILETPATEEPDILDDADIEPFEVDGFDYD

SEQ ID NO: 5429 - protein, 856 aa, synthetic construct
  REGION 1..856: note = TnsF-Tn7 System Protein
MKASKWITNVLFPEQLTVEGKQFRIIDGLEKGIVNLREDRSGYQGYVLKVEDTESLLSYALKVCLARGQPENQSESYDVRINRELGDTKGLFVLPRFIDSIDLISAETGTASTYTCFVTDWIDGKTLSMYLRDHPDEITPDWVCAVATQLHRGVQYLRKRNLKHGDLHADNIMLRNEIEDLLPLHGQGPQVDLTIIDTGHTARCTEPDNADFIAFVDLLVLLYNTALRNRRAVKETPGFALKFKQFLERLTEDDEARYFPNGGDEKYYELRQVCDSISNEFGLIQQSFQPFDAISAEHLANDKLLLSLFNKKFPWYSTVASKSPTVLTGPRGCGKSMFFRYLAAKTHLFSDTCAEKLPSIPFLGVYVGCSSDLQNNLLWLSRDPAVAERKANDVVTFFSLIVLRELLRTLAAIHDNSFARRLYGITTSAIDACVTYCNYFLPSSTETPRLSGTSRAWHYAERIDKLRVDVGLAMLRDRPSPTVLPETFIGEITTKLQENCLPLIERPIVFLLDDYTKQRIGSPIQRILNKVIWERRKSHYFKISCEKFGFDPNAIDGVKVDSDREFALIDAGDYAVSWKTQNRNTGFIKNLIDLRLSAASWDGNVESLIGHSEFDSDLKMAKYIRQNRSGTKSHYHGIEIISRLWSGDVSSILHIVREIFIRGEVTSSSRYLVPKKTQHDAIVGVSKAFAKRVHTYHPYGDMLTRILQSYGSFVKDVQVSGSFEKNSNNPRRLIQLEFSIRPEEDLFCLLREAGWKLYQIDNIDRIAKELLRRAVFIERKESRAKESADLRTIRWQFRRVYLPSFGTALERKSYLDIKTIEEFAAFIIEPAKFLRQKGIGFGVKSGGTPDMFEGES

SEQ ID NO: 5430 - protein, 856 aa, synthetic construct; identical to SEQ ID NO: 5429
  REGION 1..856: note = TnsF-Tn7 System Protein

SEQ ID NO: 5431 - protein, 670 aa, synthetic construct
  REGION 1..670: note = TnsF-Tn7 System Protein
MSNLNPSQSEAVRYIDGPLLVLAGAGSGKTRVITRKIAYLIKECGLSPRHIAAVTFTNKAAREMKERVGQLLVGREGHGLRVSTFHTLGLDIIRSELKHLDHKPGFSIFDAQDSAGLIRELLRREGGSDGLDQEIQRRISDWKNALITPEQAVSHADDTASFAASQIYAEYNRHLKAYNAVDFDDLIMLPVLLFERKPEVLERWQNRIRHLLVDEYQDTNITQYRLVRMLVGLRGALTVVGDDDQSIYAWRGARPENLVELGKDFPGLKVVKLEQNYRSMGCILKAANRLIGNNPHVFEKRLWSEMGYGEPIRVVRARDEEDEAVKVVSSLMHHRFQKRTDFSDYAILYRGNHQSRLFEKALREQRIPYQISGGASFFSYSEVKDVLAYLRLLINPDDDTAFLRVVNTPRREIGPSTLEKLGNYASQRGIGLFSASFELGLTQVLKERQLNRLRAFTEWIVAIGDRARRGDPLAAMREMAQEIGYESWLRDTCPSLKQAERKMKNVEELFDWIARMAGKEDGEPDLGELVAKLTLMDILERNEEDEDRDRVRLMTLHAAKGLEFPNVFLVGMEEELLPHRTSIEEDSIEEERRLAYVGITRAQQNLTLTLANRRRRGGEVVRCEPSRFIAELPEEDLKWEGAGIEAPAEEKQERGKAHLAALRGMLGTET

SEQ ID NO: 5432 - protein, 215 aa, synthetic construct
  REGION 1..215: note = TnsF-Tn7 System Protein
MSLAHGGVLFLDELPEFDRRVLEVLREPLESGTITISRAARQARFPARFQLLAAMNPCPCGYLSHPNGQCHCTHEQIQRYRARISGPLLDRIDLQLEIPPLPRELLRGDARSETSASVQDRVTQTRARQLQRAGKPNALLNARETESICRLSDREAALLEQAVDRLGLSARAYHRVLRVARTIADLAQNESIEAAHISEAIGYRKLDRSAAVGSV

SEQ ID NO: 5433 - protein, 956 aa, synthetic construct; identical to SEQ ID NO: 5426
  REGION 1..956: note = TnsF-Tn7 System Protein

SEQ ID NO: 5434 - protein, 956 aa, synthetic construct; identical to SEQ ID NO: 5426
  REGION 1..956: note = TnsF-Tn7 System Protein

SEQ ID NO: 5435 - protein, 298 aa, synthetic construct
  REGION 1..298: note = TnsF-Tn7 System Protein
MTEAQHVDERFRDWLWVPTEERIEKIQRPRWINYPQARRALLRMEELLSYPRVHRMPNLLVVGDTNNGKTMLIERFLRKYPVDENACGESVQMPVVAIQAPPLPDENRLYSAILRAINAPHSSSDNAGKKQDQVYDLLPVIGAKILIIDEIQHLLAGAPAAQRRFLNALKHLGNELRIPIVAFGVPEGLRAIQSDSQLANRFQPIPLYRWKRGTEFLRLLSSFERFLPLRKKSNLAKEPIAGKLLSMSEGVIGELGAVLEMAAIHAIRSGKEQIDMDVLNQIGWISPSQRRLRTEAFV

SEQ ID NO: 5436 - protein, 298 aa, synthetic construct; identical to SEQ ID NO: 5435
  REGION 1..298: note = TnsF-Tn7 System Protein

SEQ ID NO: 5437 - protein, 220 aa, synthetic construct
  REGION 1..220: note = TnsF-Tn7 System Protein
MPAGRLKECATCYWRGLLQRRLEIFKAGLKSPKHRSDLEEFAGWIAEKSGPASAAIKLRKYLALFIEIGEKWGDIPSYEDLITHFGPSVVQKNLVLFRWLRQSGRVTENKEFRTRETEKQLVSRLLGSFVDQSDAGALIHTYHGHLLEGRPKQPRSIRLALSPAAAFLKFIGGKSRETLTQQNLDKFLLEKPGQRAALTGFVNFLRREFKYDLSIKKLGP

SEQ ID NO: 5438 - protein, 191 aa, synthetic construct
  REGION 1..191: note = TnsF-Tn7 System Protein
MERDFIVRMEFFSHVLDMVAQPVRLEFRNDQGGPTYPYTPDFLVTYRTGHLGTYKNDRPRLVEVKPKKEWSENWRKWSSKWKIARRYAIEQGWEFRIYDEDRIRDTAFENIKRLAPFKRSDVDPEDAKIVLKLLGDMGAAPINYVLTRYFGGNFRGRGLSLIWSLLANRAIDCDITAPLSESTEIWIPHHG

SEQ ID NO: 5439 - protein, 643 aa, synthetic construct
  REGION 1..643: note = TnsF-Tn7 System Protein
MADDRNDDEMEAPFAVKRGRIDVHIGAYYQCHGKIYQIDSPSSETSVIGIDVDTNLPTALAIAELKPVLEGSPASGSSGIGSPSIGDKGWNEGLKKFDAIRPFINDPSPGAKAVEKAAETAGVDSSTVYRWLAKYRLYRDISCLCPEPRGWKKGNSRLNEDQDHAINKVINDYYLKPQRPSILSTIEKVEEECYLQGIKVPGASAIRARIAQITERRKLRKRGQQKEAEAKFLATPGHYPETSFPFEVVQIDHTFVDLSVVDEDHRLDIGRIWGTFAIDVYTRAVVGLYLSLDAPSQTSVAMCMASMLTLKEKSFREKGIYADLPYHGIPRRLHLDNGSDFHGDSFTRSCKKYGIDVSYRPVKVPRYGAHIERLIGNFMKKTHSLPGTTFSSIKEKGEYDSSKYAALTLAEYEKWLLIEICKIYHVKHHSGIGMSPNEKWRRYYLSAKNKGEPLAPSRPVDDKTVLIDFLPIFDRTVQNNGVTIDDITYYDDVLRGYIGATEPDEIKKKRYFEFRRDPRDISRIWFFDPSEDSYFPILASSQPFPDCSIWEWDKAKKALAAENPRGAVNEELIKARLEQRAIVDASIAKTKKQRRENQRRRQHDDIRQTQKTPVPLAKPAAASSLTEISELADVVREGFDDIS

SEQ ID NO: 5440 - protein, 255 aa, synthetic construct
  REGION 1..255: note = TnsF-Tn7 System Protein
MSSQLFRVKIELSSATSIYAFAANSTSHSGARAKPGEVSLAHLGVLFLDELPEYPRAALEALRQPLETGRAVVARAQAHVSYPARVQLVAAMNPCRCGHLDDPAQACGRAPRCAADYQARISGPLYDRIDLHVDVPPVAAADLSLPPPAENSAKVARRVAQARQRQRLRFERLPEEGRPRCNAELDGRALEELAAPDTDGRRLLDEAAGRMKLSARGYHRVLRVARTLADLHGADQPARAHVAEALAYRRARLAG

SEQ ID NO: 5441 - protein, 345 aa, synthetic construct
  REGION 1..345: note = TnsF-Tn7 System Protein
MSSWLTRSALALGTDASSLLGSLNRSWRPLKYDLDRRGLREHADLVVERSMVDQSAITKMTLLPIAEKISGPGIGEKGRWPWILMLGIRGGSRELGTQFCSICLKTDKNPYFRRCWRLAWHVTCARHSTRLLDSCTNCASQIEPHRSRQIDNHIALCWQCNADLRLIDPNIDHSGAPHIQLKLDRLLSDRKSIHRRSEEHVIFAYYSRLISSLRRSNSAPTAANPLLEYLGETGTKLRGLDIRPVSFEMLRTDDRYQLLNIAHEIRTIFRSMSANDRSRNIPSDLRRALTGIQPLQPGLQEILVKKRASNRGFYASKSDVLPRPRCDVERIWRRLKMRAHAQRNK

SEQ ID NO: 5442 - protein, 220 aa, synthetic construct; identical to SEQ ID NO: 5437
  REGION 1..220: note = TnsF-Tn7 System Protein

SEQ ID NO: 5443 - protein, 301 aa, synthetic construct
  REGION 1..301: note = TnsF-Tn7 System Protein
MTSPDKSDFPHIAPVFLEVMSMSDEARLNFIEEPRWIGYRAANSVISHLLAMMNLPKRPRMPNLLLIGDPHNGKTHILKQFKKLHGQAFVNDSSEPVVPVLIVQAPPGPVEKDLMIEILEKFSSPFRYSDPVVKLRHQAIHMMRHCNVKILIIDEFHSMISGSGMSQRQVMTSIKYLCNELMIPIVCAGTRSAAKIISEEPQHASRFEAIALDGWSLDDEFRLLVGSFEQVLPLKKHSNLRSKEKLTVLHDQSQGRIGDLHAFLRDCARHAIRSGTEMIDLETMQLYSTTRTGKGMISRRA

SEQ ID NO: 5444 - protein, 301 aa, synthetic construct; identical to SEQ ID NO: 5443
  REGION 1..301: note = TnsF-Tn7 System Protein

SEQ ID NO: 5445 - protein, 782 aa, synthetic construct
  REGION 1..782: note = TnsF-Tn7 System Protein
MTAPSAAARLASQAARLEAAMNTAVTRVTTALPMLGAEEAMAALEAAVPITVKGAARFLEELAAHIAGHPDALTSGDSRCPPVLLRLTHLLHEAGHPVVRPGCARCGTIRADLRQLREEGRICGTCDARSRRNGTCGRCGATEVQIAAKRPEGGICHRCYRRDPQVVEECRKCGRVRNPAVRLPDGGALCIGCWKQPQHTCVSCGKTAAAALLSEEGAYCHSCYNQHRRPLRQCGKCGTMGKIHRNARDDQPDLCERCYQAPERTCSRCGRVRPCQRTRSEEPICHTCYARDERPRTTCARCQRDMPVQVYWPIGPVCQGCYTVVVRSPAECGHCHQPHPLIGRDENGAGLCGPCAGRDIDFICRQCGRSGYPYGHGRCAYCVLADKVTELLTGPDGNVAPELQPLAEAFARVHEPFKAIHWIRRSPSAKLLTHLVAENRPITHDLLDELPPTRNLHYIRQALVQTGVLPQRNEDVERVPAWLEHQLADKPIQHANLVRPFLHWSLLRRARRRAKKRQFPASIGRELRRRVLIALDLLAWLDRQGTTLAELRQDDLDRWLDEEQTQRRNRVSYFLNWTADRGLSHRLTVPVIPRQEPTEFLDDDQRWQLLQRCLTDDGLPIGVRTAGALVLLFGFQVQRIRHLTADQIIDKDGHTYLTAGRHPVLLPPRLGALLRELAAQPPPRLMISHGPAAPRWLFPGRVPGQPLDLRSLISQLNRHGISARPARNGALAALASDLPAAILADLLGLHVNTAVRWVTYARSDWTGYLADRAAEQRASHTQ

SEQ ID NO: 5446 - protein, 782 aa, synthetic construct; identical to SEQ ID NO: 5445
  REGION 1..782: note = TnsF-Tn7 System Protein

SEQ ID NO: 5447 - protein, 375 aa, synthetic construct
  REGION 1..375: note = TnsF-Tn7 System Protein
MGRAVDLPGAAHLVLADNIVLLDPAPMVFDAMLEGWARQQRTRFLKWDSTIKPRLSLVRRFAAFTNQYPWEWEPSEVEAFFDHIRANNPRFTVSTGRQYQNGLRMFMDFICDARYGWLSICVERFGRAPAQILHEWNSITHVTEFEGQPGRRPLTYEEVQALFDAADGRVEDKQDRGRKGVLTAMRDSALLKAFYAYGVRRQEMVGLDITDLRRNPKMPQYGRLGALFVRHGKSSNGSPPKRRTVFTVPEMDWVVDVLEHYLTEVRPRFEVGKHPALWVSERCGRLSKRSANDAFENAREAAGLPPELDLHSLRHSMITHLVEFDYPERFVQDQAGHAVAATTGIYTSVSDEYRNRLIRRKLTERHAGLWEDDQP

SEQ ID NO: 5448 - protein, 103 aa, synthetic construct
  REGION 1..103: note = TnsF-Tn7 System Protein
MGIRWNLRRLMAAKDMFQTTDLVPLLAERGIQLSREQVFRLVTQAPQRLSMDILAALCDILGCTPNDLIEVEVVNAEVRKTAAETSGPAPAVRRTSIRRPEGL

SEQ ID NO: 5449 - protein, 326 aa, synthetic construct
  REGION 1..326: note = TnsF-Tn7 System Protein
MAKLFTEYGTEAADELKATVATGRIARAAAACRQIALTVPHPDDLTTDALYAALGAGGLQRVSPMITYMAEVGAVRLDRARIMNQIEEDRVMQVLVAYGEGPHRSLLNRYRNDFADRVRMSVTERTAITAAVDLLAELGDAPLAKLSQLHLKRTLHKGPEHRDALQEFLCFIAAQGGPILALPMPSRAELAANKKWQRDATTWRKRLEYPASSREARALIAVLIARLYALPLSRVLTLRREDVVFTPAGVTLWPKADALILEEPLADAFDKGMRQHCYWSLPMGQYLLGDEGGMLIISEAMVAKHLTDAAKYRRMFSKPGFRRGRP

SEQ ID NO: 5450 - protein, 325 aa, synthetic construct
  REGION 1..325: note = TnsF-Tn7 System Protein
MSKLLPFTRRAGRSAPATAEAGTSRMSTSDKFISIEGIARRYPAPGGATTIFENLWLPMRRGEFVCMIGHSGCGKTTVLNILAGLDAPSEGVVIVDGQAITGTSLDRAVIFQGHALLPWRSVLGNVAYAVSSRWRKAGRTEIEARARKAIATVGLAGSEHKRPSELSGGMKQRVGIARALAIEPKILLMDEPFSALDALTRGTLQDEVRRICVETGQTVFMITHDVDEAIYLADRIVLMTNGPEAKVAEIVENPLPKARDRTQLHHAPGYYALRNHLIDFLVTRSRTLRDAMPEGYDPRHPPRVRPSLSEADAAAIAAEPPAKRA

SEQ ID NO: 5451 - protein, 325 aa, synthetic construct; identical to SEQ ID NO: 5450
  REGION 1..325: note = TnsF-Tn7 System Protein

SEQ ID NO: 5452 - protein, 314 aa, synthetic construct
  REGION 1..314: note = TnsF-Tn7 System Protein
MAADLHRPQPPQTPHPEHHLKRWGQTARQQPSTIADSSRHRFTRQPPFCRWHVPARTRLLIQRNGITDGTFVRARRICRIAAHFLTDLDAQQLELKTASQHAVESYLDRHPRHFEPLAVFLRWASHSAAADRIHPVPSPYADPYTAYPIDTYRAWMRRFATDDTIPLRARICGLIAGITGRPITTIASLTTASIIDDGDEMLLRLGTSPVQLPPPIPALIRRQLAAPRRWDTESTWMFPSRLRAGAHVHASRFAVDLQRLNCRVVGLRGAALLNLAATMPVGPLCDLTGMSSNVAARWQVVAASAYAQYPAIRI

SEQ ID NO: 5453 - protein, 683 aa, synthetic construct
  REGION 1..683: note = TnsF-Tn7 System Protein
MALGVLPRRQLTGIIPALLCIALATAATGLNAVRPFTDLIPLVWVVAVLLAAGAVASGVRTFQREGRMDPAIEAVLPMLGAAQPTRALVVPVKWTRGWVGLPERIKIRYASHVDDTDPRFVDQILAGLARRLGAEYRVRKHNSRRCVLVVELAPVSDPVSREQQRAIEVVKLVIDPTASVSVKSADDGSVSKIDVKHNVGPKMAIAARRSQVEKVVSSMLPGRWRAHWDLEGDKITFEVRPTMPDMVLHEVEPAAALTHAAYKAFKIPIGPDEDGQIQSWHPAVSPHCLVIGGTGSGKTSFQHTVLTHLAHAHWRVWVLDGKRIEFAGFRDWPNVELVGARVEHQVRMLHAAHELMEERYSQLENGTARLEDFDPLALIIDEYATFKARVQRWYKTVKPKGAPAQAPVLDLLSDLARLARSAKIHILLGLQRPDVEFLGGEMRDNFGARVSFGRLSPQGANMMWDSFAVGVAIPRNKRGRGVTLNAESQPVEIQAFYTPDPAKLDSTDKADWDHLAALRPDAADYERMMVRDPEAELTDDGEGEELEPDYFQWSSAEIVAWDASVPSTTKHDALRPSNVTPLDSRERVRFVPEVDDDAPDVDAAADGDGYGESLEGPAVELEVGDLLLVDATLGLWGVVEGVEPDVVDDEYLAIEYRDLDSGEDGLLTLFDNSVISYRRPEAA

SEQ ID NO: 5454 - protein, 683 aa, synthetic construct; identical to SEQ ID NO: 5453
  REGION 1..683: note = TnsF-Tn7 System Protein

SEQ ID NO: 5455 - protein, 400 aa, synthetic construct; identical to SEQ ID NO: 2759
  REGION 1..400: note = TnsF-Tn7 System Protein

SEQ ID NO: 5456 - protein, 108 aa, synthetic construct; identical to SEQ ID NO: 2761
  REGION 1..108: note = TnsF-Tn7 System Protein

SEQ ID NO: 5457 - protein, 257 aa, synthetic construct
  REGION 1..257: note = TnsF-Tn7 System Protein
MALELLAWLDQQHLALEDLTQEHVDDWITGSASQRRYLIRYFLNWTASRRLTRKLTVPSIPQQEPQALLDEDDRWHTLQRCLTDETLPLDVRAAGAITLLFGPSTERLCNLTPDHLQLGSKHTHLRLGRHPVLLPPRLAGLLHQLAEEPLPGSRALFAQATPGPRLLFPGLVPGKPISTHAMTQKLNRHGISVRAARNSALAALAADLPSPILADLTGMHRHTAIRWVAYARRDWAEYLAARAEDEAEQRKGTAETR

SEQ ID NO: 5458 - protein, 357 aa, synthetic construct
  REGION 1..357: note = TnsF-Tn7 System Protein
MRWLMRPHTRTWLTQLGNRAQHTELTHADVDALPPSQGRHFLRALLVETGILTHRDEHIERLGTWLTETADTLPHHHRTLIVAYGHWSVLRAARRRAHRGHTFTTYADAAAREQIRTAIRFLAHLGDLGIAISNLTQPITEAWTAGNRDRTRRLAAFIAWLKRRDIVTDIIIGTPPTGHSADIAAADDHTRLITSLVNGSPTSDLATRVAGLLVLLYGAYISRIHQLTTADITITATTTQLRLATHPIGLPIPVAALLHQLAAATENDARTTTPDRSGHYLFPGARPHHPMHPTTLHRKLAAIGITKAHRNHALATLTSELPAAVVATQLGLHINTTTNWATISKRDNAEYLLARQP

SEQ ID NO: 5459 - protein, 511 aa, synthetic construct
  REGION 1..511: note = TnsF-Tn7 System Protein
MDTDLRLGEVRVQSNPTPSHLSQFGGAQSIEVRETHTGIVLLCGERALKAKKPVVTDFLDFGSVDKREDACRRELRLNRRLAPEAYLGVGHLCTPGQAPEPLVVMVRLPEKYKLAHLLTAYGDDGDHAVAGEIERLAVRIARFHQNASRSLEISRRCTSSAIWERWRTNLDEIRELGPPNPDSDLLDEVGLLAQQFLAGRTTLFDERIAAGRVVDGHGDLLTEDTFCMPDGPLVLDCLDFDSRLRSVDGVDDIAFLAMDIEYRGHRRLADVLVSTYLAEARDSAPRSLIDHYVAYRAIVRAKVDLIRVAQGEAGAEGRALSHLLLGRDRLGSAQVRLGLIGGLPGTGKTTVSRALADEVGAKLLSSDEVRHELHRAGAIAGGAGEFGTGLYSDANTRIVYATLLSRATHHLERGESVILDASWTDPGFRLLAHAVADSCHAAAIDMRCVVDPHEAERRIMQRPDAHHSDATPAIAAAMAARFEDQWPDALSIDTGGSVHGAVDCAMRRWWR

SEQ ID NO: 5460 - protein, 511 aa, synthetic construct; identical to SEQ ID NO: 5459
  REGION 1..511: note = TnsF-Tn7 System Protein

SEQ ID NO: 5461 - protein, 370 aa, synthetic construct
  REGION 1..370: note = TnsF-Tn7 System Protein
MGADNGGAGRVWSSHGVVHLDPKPAVFDAMLTGWERQQRARFLRESTIGNRTRLVRRFAEFTNLYPWQWTPAEGEAWISALRSGPKPLRLSTLRSYEVELKMFGEYLRDPRNGWVQECSELFGTVPQEVFHDDNSIVHVGEYEGDPGRRPLTYDEVQTLFDTADARVDRIHALHRKGVLSAMRDAALLKFCYAYGLRRREAALCDLVDLRSNPKLPQFGRFGSVTVRHGKASRGGPSKRRSVLTVPEMGWITEVLEHYIDEVRPQLGNGRAPGLWLTERGTRISTRATGAVFAKTRDAAGLDPLLQLHCLRHSYVTHLVEFDYPERFIQEQVGHSFSATTAVYIGVSNEYRNRLLTRAVAARYGSALQGD

SEQ ID NO: 5462 - protein, 112 aa, synthetic construct
  REGION 1..112: note = TnsF-Tn7 System Protein
MKHLDYHWHLRAKMAAQGMFATTDLQPHLAERGITLSREQVYRLVTGHPQRMSMDTLIALCDILDCTPNDLIEPAITETATATKAAAAGRRAIRATAPRRRTTITRPTETPE

SEQ ID NO: 5463 - protein, 272 aa, synthetic construct
  REGION 1..272: note = TnsF-Tn7 System Protein
MRLERWITDTVDDVADPENRKPVRHYATWHLMRRLRARNRGSPVTYGQFTGIRQRLRGAIAILDWLADQQLSLATCTQADIDRWLTDSNARYRTDGSGFLRWATTNKLVNTSLVGVGRGWQGPAELIAGEDRWATARRLLHDQTLKPEGRVAGLLVLLYAQRASTIAGLTTDHVTTGTNGVRLRLGSSPRRAARTTVHPRQVTGRHPIRARGHRRTPKLTVAVHRRTDQHRPNGQTATFIRNPTQPRPARPPCSPSPPRSAAARDRLGDGTS

SEQ ID NO: 5464 - protein, 272 aa, synthetic construct; identical to SEQ ID NO: 5463
  REGION 1..272: note = TnsF-Tn7 System Protein

SEQ ID NO: 5465 - protein, 418 aa, synthetic construct
  REGION 1..418: note = TnsF-Tn7 System Protein
MSGSRKYPAELRERAVRMVAEVRGEYSSEWAAIESVASKLGIGSAQTLLNWVRRDQVDTGKRPGVTSDMAEELRKLRAENRELKRANDILKSASNFLRGGARPPQSVIVDYIDTHKQEYGTPPICRVLTAHGCKIAPSTYYDACARRRQPSKRQIRDEELKTEIARVHRENYSVYGARKVWLQCHREGIEVARCTVERLMGDLALEGARRGKTKRTTIADPQAGRPDDLVQRQFCPEAPNVLWVADFTYVSTWSGWVYVAFVIDAYARRIVGWRTATTMTAQLVLDAIEHAIWTRQREGIDDLSGLIHHHDRGSQYTSIAFTGRLVDAGIDASIGATGNSYDNALAESINGLYKTELIKAQGPWRTVDQVEVATLEWVDWFNHRRLYEHCGDLPPAEYEALYYRDRSSPEAWCNEVAA

SEQ ID NO: 5466 - protein, 460 aa, synthetic construct
  REGION 1..460: note = TnsF-Tn7 System Protein
MGRLTEAYVAGHHYTYDYTSPASAACPTGTRANAGLNTNRVRLLDQTAAGTAETRYCYDAADRLLATEGATALSDVTYDESGNTTGWASADGSTTKLRWDGSDRNIRVQTTGPNTAQNANVEYTRDASNRIVRRDPRDCDNNTVTRYGFTGDGDAPDLTLNADGRLTSLSLSLSLSLPGGVLYTTKVGSDGAFTPSFEHLSVRGDLVLTTDAAGRQAGELRTFDPYGQPLKTDGTVDPHNVPDNTLDALPPRKPLEHLRSVLVAAGALPHRDEQMSRLERWITQAVSERPDPAQQQLLRSYGIWHLLRRLRRRVEGTETTHNQLATARQHLRGAMVFLDWLASHDLTLATCGQPDFDRWLTDDKATHRDEAGHFVRWAKKQKLTRLTYSAVRWGGPVRVIDTETRWEQARRLLNDRSVKPEDRVAGLLILLYAQWPSGHQSPHPGTRRTPRQRSTAAARP

SEQ ID NO: 5467 - protein, 460 aa, synthetic construct; identical to SEQ ID NO: 5466
  REGION 1..460: note = TnsF-Tn7 System Protein

SEQ ID NO: 5468 - protein, 604 aa, synthetic construct
  REGION 1..604: note = TnsF-Tn7 System Protein
MTHVHSCMQDAVEEALTVEERETVRSRAVRLLYDTGKPPEQVALHLLSITNPQGEWATECLRSAADIAVRRGAPAVAARYLRRALLETSSGGEDRAGVLLDLAEVERSVDLAVSTRFAFDALPLLSSPRDRAAAAVRVVPTMAGDRPVPVLRVIREISLELGDPDALTGIDRELALRLEARLRYAAVRDPVELTGVGARLDSLGPDPGMDTSAERELLTVLLYGATLTARPRAAEIARLATKVLRHEVASPTHMHTTMPLLVCTLTSTDAIGEFSALDTALEQARGRNASAEQALICIAQAWVLLRMGRPAKAGAAVADAVMMDLLERNRWDPMTTAMSMTVAVESRDVVLAERLLAIAPEWTDNPFLVACFGLLRGSVAAWRGALAPAVEILTDNGRELDRLGWRNPVLLPWRTSVALMCRRLGKTDVGLELAEEERVRAEAWGAPVGVGRALRVLGALTAGARGVTLSRGAVAALESSADKLELGKALLQLGTRLRVSGEPEATELLWRCRRLATECEVPSLAERARVELARAAVDAGRSPLTRSEQQVALMAASGRTNREIADTLMVGMRVVEKHLTSSYRKLKVGRRSELAAALRAAGHL

SEQ ID NO: 5469 - protein, 604 aa, synthetic construct; identical to SEQ ID NO: 5468
  REGION 1..604: note = TnsF-Tn7 System Protein

SEQ ID NO: 5470 - protein, 178 aa, synthetic construct
  REGION 1..178: note = TnsF-Tn7 System Protein
MDPVDRDFAGPEPNRLWVTDITEHPTREGKVYCAVVLDVHSRRVVGWSTDSSQTAALATNALGMAIPTRSPLSDTVIHSDHGVQFTSWTFTRRAKESGLLPSTGSIGDCHDNAMIESFWGRVQTELPDRRRWRTRLELANALFEYLEMFHNRRRRHTALGMLTPIEYELRHTGIAPAA

SEQ ID NO: 5471 - protein, 294 aa, synthetic construct
  REGION 1..294: note = TnsF-Tn7 System Protein
MTRSYRFISEHRAVFGVTRLCRVLRVRRPGFYEWLAAAPTRQARVADDERLAIEIAEVHAGHRGAYGRPRIVAALRRRGLRVNHKRVGRVMRERGVVGLTRRRRRSLTRSDTVTAPVPDLIGRDFTAPAPGRRLVGDITYLPTREGWLYLATVIDLHTREVVGHAMADHMRADLVCDALDLAARRDLISGNVVFHADRGSQYTSGRFRSTLAGHGMRPSVGRTGSCFDNAVAESFFATLKTEIGTTVWDTRDDARRDVFAYLGYYNHDRLHSTLDYRTPHEVRVGYRQGLALAA

SEQ ID NO: 5472 - protein, 806 aa, synthetic construct
  REGION 1..806: note = TnsF-Tn7 System Protein
MTIGDRSVLDPVGFIADLVVAVDDRLALERVRSVVTSVAGGRAKSRRLAAFLAGRPAVLTDGRSPAPRAVGDLLIALRKAGAEVSPPVCGECGKPMRTLQRRGQDWYCGACSLRPAPCVACGQLRHVSTRDRAGGPRCAHCPDRDDRDPISVICDVVARLDPAVDRDLIAGSVGRLASRPAHQRRIAWALEAQPELLTGAGHLAPVRAIIPLIDALHAAGVAGIVRPACPLCGRVVRIDKPLDGQRVCRTCIAHTRIEECARCGARREPATRDEHGRPLCPNCLITDPNNLEVCLNCGRRRPVNLRTPDGPICGTCPALPTATCSICGEETPCGTSRITGRPWCPACQSRTARCCSCGRNAAVISGTLTHPHCQDCTTRAVWHDCPTCSDPSHPHPGQCVRCRINQRLNELLGPPSAALHPGLQALRHNIATAEHPITAMRWLKKKSVAPVLADLAAGRRALTHEALDELPHSPPLAHLRQVLIGVGALPRRDEHMVRIERLIDQTLAAQTNPEQQKVLHRYTVWHLTRRLRQRNNGHPTTIQQFNSVRQRIYAAVAFLDWLTEHQLTLGSCQHSDLDRWLTDATATHRGAAGHFIRWAHRNKLTSVRVGAHRWMGPTRPLDDQHRWDIARRLLHDDSLKPDDRLAGLLVLLYAQTPAAICRMTIVDVETEVDPVRLHLGSSPIHLPEPVAELARLVVSNRKGHATIGALTPSIWLFPGGQPGRPISTGQLTQRLNRLGIRPGAARSTALFQLATEIPAAILARTLGIHTDVAVSWQRLSAGDWTNYAAHISRRPNSLTRNTKTRA

SEQ ID NO: 5473 - protein, 806 aa, synthetic construct; identical to SEQ ID NO: 5472
  REGION 1..806: note = TnsF-Tn7 System Protein

SEQ ID NO: 5474 - protein, 175 aa, synthetic construct
  REGION 1..175: note = TnsF-Tn7 System Protein
MRRTETAKLDLVDFGRNAAAPQFGGFGTLNVRYGKAKRGQPPRRRNVLSVMDWAVDAVADYVENVRPKFGCPDHPALWVTERGGRIKPAEINARFVAYRDALKLSKDLVPHSIRHSFVTHLTEDGVDRRFIQSQVGHECDSSTAIYTHVSSDFMNTMLQKALAPALASIPPADKD

SEQ ID NO: 5475 - protein, 111 aa, synthetic construct
  REGION 1..111: note = TnsF-Tn7 System Protein
MPAKLDYHWHLRKVMADRGMFATTDLIEPLDKRGITLSSSQVYRLVVERPERLSLKVLMALLDILDCTIDDLIEPAVSAQASARAKKAVGAEAGIGELRPKRARVRGAKGP

SEQ ID NO: 5476 - protein, 669 aa, synthetic construct
  REGION 1..669: note = TnsF-Tn7 System Protein
MTARIDRSLLGQQVGPLLVLLADLEPTLETEAVLAALCRAAAHPAGQRAIAHEVAERPELLTSHGAAATLPGVLRFIDAMLLAGATTVVAPLCPRCGKQRRLGRPFGGLRLCDGCTRQAVAMTCGRCGKLRPPARRNDNGHPICQACWSRDPRSWKACTKCGDQRRVAAMTDAGPVCTRCRTRPEHVCGICGRTARCTISRANGQPMCDRCRERWAVCSHCGTGASVKGGTLEAPLCARCLNPDPAFWKRCGTCGITWQLTTAECARCSLDRRLRRILTATSGTSTQIDQLREAFARVERPDHALDWLNKPGVRDTLHAVALIQPAITHQALDALPASGTLSHIRSMLVVAGALPPRDERLAALEPWIKRVIAARKSLEHQQVLHAYAIWHHLRRLRARLADQPASHHQVTNIRHNVSAAAALLDWLHERGSTVATCTQADLDQWLASKPAHAARSTNFARWATTHHHAPRLTAPATRWTGPAGPLDQDQRWADTRRLLHDDTIPTADRVAGLLILLYAQKLNVITTLTTQHLSHADGQTLLKLGSRPIVLPAPLDRLVNDLADATRQPPSGSLINTPSTCLFPGRWPGRPLTEGALARRLHAHGLQLRQSRNTALFMLAAEVPAAILAKMLGIHIKAAVQWQQLSSGDWTAYAAEVSQRNPEEFRQFQ

SEQ ID NO: 5477 - protein, 181 aa, synthetic construct
  REGION 1..181: note = TnsF-Tn7 System Protein
MTNGNRLVAITGAPGAGKTTMLEHLAADGFATMAEGARAIVREQVSIGGLAQPGLDSLLYAELMLNWEIRSFREASRLAGPVFFDRTVVDAIGYLMMIGEEVPHHFYEAAKQLRYDSTVIVAPFWPEIYLQDSERDSGPDQALRSCEFMCRAYEEVGYSLLVLPKVAVEERVSLLRSHLQT

SEQ ID NO: 5478 - protein, 181 aa, synthetic construct; identical to SEQ ID NO: 5477
  REGION 1..181: note = TnsF-Tn7 System Protein

SEQ ID NO: 5479 - protein, 669 aa, synthetic construct; identical to SEQ ID NO: 5476
  REGION 1..669: note = TnsF-Tn7 System Protein

SEQ ID NO: 5480 - protein, 441 aa, synthetic construct
  REGION 1..441: note = TnsF-Tn7 System Protein
MAGKSYTEEFRQQAVDLVRSTPGATVKGIAADLGIGRGALSKWMRERPAAPGVSGEQAAGQDAPAEPAGPAAGLAGRARGAGPASRMAQLEAQVARLEAEAARRDAADARREAEHAAEVEKLSTERDILRKATKYFASGDKLVNRFQFVEDHHQAFGVKRLCEVLEVKRSSFYEWRKAAPGRAARAASDQELAGRIRALHEADNTLGAPRMTTELNQGLPEQEWVNHKRVARIMRQERIAGLRLRRKTRTTISDDSGQTFPDLVKRRFSAPAPGCLYAGDITYLPLADGRNLYLATVIDLASRRLVGWAIADHMRADLVVAALDDALGTRGSLRGAIFHSDHGSQYLSKAFVKRCKDLGLRQSMGKVGSSADNAAVESFNATYKRETLQGEPFWPDEASCRRDAFRFCTRYSARRRHSYCGNLSPADYERTLKTATFVLAA

SEQ ID NO: 5481 - protein, 221 aa, synthetic construct
  REGION 1..221: note = TnsF-Tn7 System Protein
MDEGTPMIIELRPHGMPGLLVAIEGPDGSGKTTLEEVVESALRRRGLSSVLTQQPTRWWRDDPKVAETRRNPDEGLSPMALALFSLADRFEHQVRVVEPALLAGRPVLTNRYVFSLLTHFMVEGDLDLDALRPVLAHLLRPDLLIVLDAPTHVLLERVIERDGSDPRRWDQQRAYVERSREAYVSLASRNGGHVLRTDRPGAARDALTLVEELLLDRRGSS

SEQ ID NO: 5482 - protein, 221 aa, synthetic construct; identical to SEQ ID NO: 5481
  REGION 1..221: note = TnsF-Tn7 System Protein

SEQ ID NO: 5483 - protein, 116 aa, synthetic construct
  REGION 1..116: note = TnsF-Tn7 System Protein
MTEKLDYRWHLRRIMADRGLFQTTDLIKPLAQRDIRLSSSQVFRLVTERPERLSLKILMALLDILDCAMDDLIEPVAAAGTRTRPKKMAAGGDHDVNAAGLGALRPKRARITRTSE

SEQ ID NO: 5484 - protein, 701 aa, synthetic construct
  REGION 1..701: note = TnsF-Tn7 System Protein
MTGMVVCAAGHQMPAGPDRVCFTCRRDEVIACARAVETSLSGDDVAAAVDTVATNPAVWRFLAEAFARDPDALAHAAPPVVGRLVTELIARGSTVMTVPTCVTCGVSGRPLTVTDDGGMCKRCAARRNPAACSHCGIVKPVAGRTNSGGPICEPCRRHQRGHRPCGVCGNTTSIAVRARGDQPDICVNCYRRPEATCHVCRRRRPCSFADTDRPICASCSPRATAICARCGAHRPPAARWDEGPICDTCYTAALRHRGRCAVCGDQRRLVAPPGPEATTCADCAGVPVVHACIDCGLEDKLYEKDRCARCSLRRRATELLSGASGQVPAELNGVLEAICAARTPRAALNWLRQGAAAAVLTELVSGQLQLTHEALDAHPHPKAADYLRHMLVASGALEPRDEALARTERWLTDLLATIDDNEYRRLVQAFAAWQVMRRLRRHAETRPAPRTYTAHAKLRIKVATEFLTWLTAHDTTLAEARQTDIDQWLATSPRACHVRDFLTWATERRHCPAFTIPAPQRFTGTATDSDQRWAHLARLLHDDELALVDRVAGCFLLLFAQPQSRIAVMTTDQITQHDNEVFVRFGQHDVPVPEPLDTLLLQLIANGKSYTGIGSPADTQWLFPGGMPGRPITASRLAERLRAVGISTQAGRRATLIDLAAKLPAAVLADLLGLHRATAVKWTGQAGGGWNRYAAEIARTR

SEQ ID NO: 5485 - protein, 701 aa, synthetic construct; identical to SEQ ID NO: 5484
  REGION 1..701: note = TnsF-Tn7 System Protein

SEQ ID NO: 5486 - protein, 362 aa, synthetic construct
  REGION 1..362: note = TnsF-Tn7 System Protein
MTEARTAGSAALVLVDGATPLRVEPALFDSMLKGWRLQQSSRRLSGPLIDGRERLVRRFAEFTGAWPWQWTPEQAEAWIASGGWAHSTVRSYQGALGMFLGYVCDPRYGWIAECEQQVGARPVQVCHEDNTVSHVADHEGRAERRPLTRAELQAFFDAADDRVEQAAGARRKGWLATFRDATLFKVVYGWGLRRRETAMLDMADFTVNPAAPELGRLGVVHVRYGKAMKGSPPRRRAVATLMPWTAEALEQYLEQVRPRYGCERHPAVWLTERDGRISTRQIDDRFAQFRRLADLPDDLSVHSLRHSYVSHLIEDGVDPLFVQQQVGHSWASTTAAYTTVGTDARNRMLKQALGRVYGPDRG

SEQ ID NO: 5487 - protein, 109 aa, synthetic construct
  REGION 1..109: note = TnsF-Tn7 System Protein
MANKTGYVWHLRRVMADRGMFQTTDLIAPLAERGAKLSREQVYRLVTGTPERLNLAVLAALCDILDCSVGDLIEPRTSATPTSAKTSSSPEPPERLRPRRARILPEPGQ

SEQ ID NO: 5488 - protein, 209 aa, synthetic construct
  REGION 1..209: note = TnsF-Tn7 System Protein
MSEIRSQQETLATYPQRMLDAYLTDFPSQRDALAPFTRWLRRHRLSSVRVEFRTHRLEGRHYESDDRWQMARRFLTDAEMDSKTGAAGLLVLLYGIHLTRIVTLSTDQVDETSRPVKLTVGAEPIELPDVLGTAIVELVDAAQRRPDGWLFPGRNPGLHLTPGPLSRRLRAEGLRSGNARTTALIELTRQMHPQIASHLLGITPQSATA

SEQ ID NO: 5489 - protein, 320 aa, synthetic construct
  REGION 1..320: note = TnsF-Tn7 System Protein
MLPPVDRHLIDTEVWLHHRLGQLGEHPHERLLRQFALWHQLPRLRATAATRPLRPTAKFYTTQQFTQAQTFLTWLHDNNIAPAAVTQADTDNWYTSHRVHQRQGVRGFQTWAIEHGHLPRHLVVRQVVFKPGKTITQQRRLALLRRYVTDPTTPNGTGDNPTDTVPLPIRVAVCLLLLYAQPLSRIHCLTTADITESDTGSGRELFIHLGEPPTPVPEPFAHLLRRLAAEATEAKGNEQGWLFPGRLAGQPITYRTLSDRLRQLGFPLIDARVSALRQLVLQVPAPVVADALGFHQKSTARQVAHAGATWNRYAVGNHNT

SEQ ID NO: 5490 - protein, 320 aa, synthetic construct; identical to SEQ ID NO: 5489
  REGION 1..320: note = TnsF-Tn7 System Protein

SEQ ID NO: 5491 - protein, 306 aa, synthetic construct
  REGION 1..306: note = TnsF-Tn7 System Protein
MTAVVTAHGVTKRFGDVTALDDVSFALAEHTIYGLLGRNGAGKTTLMQILTGQAFASSGNVSVFDAPPVENPAVLSKVCFVRESQRYPHYYTVRHVFHTARRLFANWDDTFAHSLAADFQLPAGRLVRRLSRGMLSALGVTVGLAARAPLTFFDEPYLGLDPAARQLFYDRLLADYSGHPRTVVLSTHLIDEVSDLIERVLLIDRGRLLLDEDADDLRGRAVAATGRAEAVDGFAAGRTELHRERSSGQVRSTLLGGLGPHAKTLAQTLNVELEPLSLQQLVVRLTAPPTTTAPTTTAPTDREAAR

SEQ ID NO: 5492 - protein, 306 aa, synthetic construct; identical to SEQ ID NO: 5491
  REGION 1..306: note = TnsF-Tn7 System Protein

SEQ ID NO: 5493 - protein, 627 aa, synthetic construct
  REGION 1..627: note = TnsF-Tn7 System Protein
MTDASTASAETPPPPPPAEIRYSGEYSVNPLGDVSFTHMCARLPSVLRRICRMAWQLDRTAVLLLAACQLVTGAAAAVGLAATARAMQPILGLGTVADRLHQAVPALIVVAGAAALGRLSSALASYADRRLTPPLTTYADTALVEAVCRVEAAAYAQGGFADRQEAAEMGVVRTHVMVNDAQRFVAALIRMVAAGGVLSVLHWAMLPLLLLAVLPAGVGAVLTARVDYEMHYANVSDRNVRHMMRWWTTTPKHGDEVRANGMTGYLLFWYRSLSQRIDRRLLDAAPRTLRITLLSSAAGGFFLLLAWAALTWLAITGRIELAIAATAVVAVQTTLAALSQVVINGAALFHTSLYLTDMQTFLDDAAQRAPQRGELSAPTTVEEIRIDDVVYQYPGKDRPAVDGVSLSLRRGEILAIVGENGSGKSTLLRLITGIYLADKGRVLWNGADLATLDQNSVWARTGLVPQLFAQWPLRVRENVTLGQPRTHDDLHVWEAIDAVGMREAVEALPDGIETLLAREVFGGAELSGGQWQRLACSRAIYRRPELLILDEPTSHMDARGEHQIFEKIKRGATDRITIVVTHQLENTRLADRILVMDKGRVIEHGQYEDLVSSGGLFAELVALTQDR

SEQ ID NO: 5494 - protein, 627 aa, synthetic construct; identical to SEQ ID NO: 5493
  REGION 1..627: note = TnsF-Tn7 System Protein

SEQ ID NO: 5495 - protein, 351 aa, synthetic construct
  REGION 1..351: note = TnsF-Tn7 System Protein
MLEGWTRQQRGGRRLQPKAINDRLRVVRQFNDFAEAYPWNWSAAAMDEWTTYLMAELHRAESTIRGYQTAVRLFCDYITSPHYQWPQECELRFGTHPVQICHEWNTAAHLVDYEAEAGRRPMTREEIQLFLEYADAQVDRAIRLGRKGALAAYRDATVYKVIYGWGLRCTETSKLDLTDWYRNPKAPELGRFGSLHVRYGKRSKGSPPKRRRVLSVMPWAVDAVEDYVTNIRTRYRASVGAALWPTERGGRLQAREIEDRFAEYRDALGLDSDLVPHCLRHSHVTHQIEDGADPAFVQLLLSPLDCVLDVQHGPGVGGDLCGGGDYLPPFITQFPRRSDAGATGADARLVA

SEQ ID NO: 5496 - protein, 103 aa, synthetic construct
  REGION 1..103: note = TnsF-Tn7 System Protein
MATRGMYTTTDLRPLLAERGIDLSPSQVYRLVVERPERLSLKTLMALLDILGCAMDDLIEPVTVRASGRKTATAGSTDSAPPGPAAGVGDFRPKRARIVPTEE

SEQ ID NO: 5497 - protein, 450 aa, synthetic construct
  REGION 1..450: note = TnsF-Tn7 System Protein
MISDGNGNPHPRLRALEHYLLRNPENADAVISWVRRSPMARVVHDMATGHIPISLRAIAEHPATGATGYLATLLMESGVVPTENFDRLRLEIWEEEHFAILPNPINRPLLKQYAAWIVNPRFADVAHLSTKDESLRLRQSKAHLSAVCELLGPLGDLDLDLGTVPQRTFDDYVATHGRAGKQLTPFIRWARTQGLTRLHSEYLRSDLGTSGASDDERWAWAKDLLTTDDVGLDMRVGGLLAIPYGTALTRVVSLQRDAVTLEGDITSLSLGTEPIKLPAALGALLRRLLDTESGADLENNIWIFKGRRAGRHLTTATIRGPLARRGINLRAARNVALMSLARDRPPSVLAELLGISIFAAERWSAHSGHDWTDYPPRTHYDRTHLGLHARFHASAAGCPATLYSVPFHAREILSIEATPTFKVIRYVSSFLVSNGRPLSCLGQTRKQSQF

SEQ ID NO: 5498 - protein, 200 aa, synthetic construct
  REGION 1..200: note = TnsF-Tn7 System Protein
MPQQQTPLILLGGASGSGKSYLAQLFGKPHLELDNFYRELAEHTPESPLPQTPYGEVDWDHRGTWNCDKAVDGIIELLETGQTQVPNYSISTSSYDGTRPVELNGGPLVAEGIFVSEVLAPLRTLGVPVQAYYIDVSPVLTALRRFVRDVKERRKPIGFLLKRGYALFRADQQIRATHLQAGFVPMKKKSIRALLANPAR

SEQ ID NO: 5499 - protein, 200 aa, synthetic construct; identical to SEQ ID NO: 5498
  REGION 1..200: note = TnsF-Tn7 System Protein

SEQ ID NO: 5500 - protein, 369 aa, synthetic construct
  REGION 1..369: note = TnsF-Tn7 System Protein
MQHFLDVSNLRQVLSRDSGTAALHPDEAVYESMLGSWEQQQRSRSLAEATIASRTSVVRRFGEYAGSYPWQWQASDLDEYTSHMRSKRLALSTIRQRQGILQVFCNYLVSPDYDWVEICEAQFGETPSQICLPWNTTKHVADYEGLPARRALTFDEIETLFNYADSRVETAIRDGRKGALAALRDAQMFKTAYAFGLRRAELRGLDLHDLHANARVPQWERYAAMHVRWGKANKGSVPKRRTVLLVPELSWWIDGMRQWVYEGRALFLPGDLPALWPTERKSRVSLEYIDRRFTTLRRKAGLDPALTLHCLRHSYVTHLIEYGYADRFVQEQVGHQHSSTTAIYTSVSGDYKNRILADALGRFNTLEVP

SEQ ID NO: 5501 - protein, 114 aa, synthetic construct
  REGION 1..114: note = TnsF-Tn7 System Protein
MSKRVETVWNLRRLMADQGLFKTTELIPLLEEYGVSLSREQVFRLVTQTPERANLSFIGAVCAALNCAVSDLIEVRVVEEKPVVNATEQTQGSIGNLRPVPARIHRPPQPPQDK

SEQ ID NO: 5502 - protein, 203 aa, synthetic construct
  REGION 1..203: note = TnsF-Tn7 System Protein
MDDRPAQVSRSANFVRWKTTHRHASRLTALAARWTGPAGPLDQDQRWADARRLLHDDALPTADRVAGLLVLLYAQKLSTICALTTHHVRHEEGRTLLVLGSRPIALPVPLDSLVNEFTTGRKRPSGSLIHVPSDWLFSGRWPTQPLTEGSLARRLHAHGLRPRQSRNNALFALAAEVPAAILAKTLGIHIKAAIQWQRISSGD

SEQ ID NO: 5503 - protein, 763 aa, synthetic construct
  REGION 1..763: note = TnsF-Tn7 System Protein
MADPEDVANTISGTVEMAVQAGTIHEVHLYQQPETSGPWPASRSTVELPYRAGIVPPRALAFQRRSQTARPGMFVMPRDSATVTDETVTTTVLSGMGGVGKTQIAIDFAERTWAAGETDLLVWVSAGSREAIVSSYARLAVVLLGIEDQDRDRGARRLLEWLANASARWLVVLDDLQRPSDLNGLWPPEAPWGRVVVTTRRRDAALRGHRRQFVEIEVFTDTETFGYLTGVLVDRAHLMEGASALASELGHLPLALAQAAAYMLDRELSCSEYLARWVDRRNLLTSLLPDDEALPDDYQVTLAATWSLSVEQADRLAPAGVAGVLLTVASMLDSNGIPVELFSAPSVLQLLATHLQREVSAQDAQDGLGCLQRLSLITSDRVSNPRGIRVHALVQRATRDNLPEHRKAAAAHAAVAAVLHIWPTIDRDTTLAQVLRANASSLNEICGEYLWESGAHELLLRAGESLVETGLVSDATRYFQELATRAFVRLGPLHADTLAIRGHLPRCLGRAGDPTAAATACESLLLDQLEALGPHHPRTLATRIDLAYWRGKTGDVTGALAAGEELLADQLQALGPHDPDVLMTRHYIAYWRGKSGDVHGALTACQELLIDRLRVLGPDHPDTMITRGNIARWRAHSGDIDGGIEGFEAVLADQLRVLGPDHPGTLIIRGSIARWRGEAGDPVTALAAFEELLIDHLRVLGPHHPNMFIIRGNIARWRGEAGDPAAAVSAFEELLADCLEMLGPDHPDTARTIANVAYWKAMS

SEQ ID NO: 5504 - protein, 763 aa, synthetic construct; identical to SEQ ID NO: 5503
  REGION 1..763: note = TnsF-Tn7 System Protein

SEQ ID NO: 5505 - protein, 258 aa, synthetic construct
  REGION 1..258: note = TnsF-Tn7 System Protein
MEKTRAPDIAARKIVSSFEVFKFLSDWYEKHEAMPTYAEYATSLTVAKTRQHLTVTYFLDESGLIPLDHERKCEIGNLDCIDRAFNRIPASSPLFKYMDSYHKLIMTKYETGKNTAHTARLSFGTAVNFLALGEYQNKSQPDVELIRQYLWFHTGQRASLWGFITHLRKHHKVELPSLDNKVYELALDRPHESTERTKQKLIALLRSGEFSQEDYIELGLAYFHRVRMPKELNGIRELVSVNEQREVKLYKDIFYLPP

SEQ ID NO: 5506 - protein, 238 aa, synthetic construct
  REGION 1..238: note = TnsF-Tn7 System Protein
MKFSHKNRKIGYTYGSLSGAYSFRGEKSLSFESKIERDFLTLLEFDDSVIEVTEQPFTIEYENHNGRPTTYTPDFLIEFKSPLTSSSYSAYRKSLLVEVKPHDILKKKFLDLKPKFQIGMRFAKANDMVFKIFSDSKIRTPKLKNIQMIARYKRYKYCLNEESRIREHLQNVGHTRLDHLLCFLYVTEEQRSIALGQIWQLVWNKQIGCDLTLPLNLQTVVWLKIDETYEEGVFNDRF

SEQ ID NO: 5507 - protein, 629 aa, synthetic construct
  REGION 1..629: note = TnsF-Tn7 System Protein
MTDFESGGCYADRRRITFRPNDFVESFGEAFRLTQIINFEDVIGVNLKTGRAERLLIKNLRHIDDVDTEAYQSLRDMEDFSDAEWKEIEKRFISIQPLLEGLTRKEIEQYAEKIEIHFTTLYRWLKNYQTTGTITGLLPKKRGPSQGTLKIESRAESVMHEVINNYYLTSQKPSVSDTILVIKERCEAQNLAAPSGNTIRNRISQISEEKRLRHRNERGRARTKFEPTPGKYEADYPLQVIQIDHTPVDLILVSDDEHRLPIGRPYVTFAIDCYSRMIVGYHLSLYAPSTTSVAMCISQMINPKDQLLIQFKVDSSWPVWGNPEFLHLDNAGEFRSDTLRQSCLAYDINIDFRPVGKPNYGGHVESLMKTVMKKVHNLPGTTFSNIEERAEYDSDGNATLTFDEFERWLIIYITKFYHKKKHSSLGISPEDKWHEGIFGSNHSNGIGLPPKPSDPETVYRDFLPIERRTVQSNGVNINGLNYYEHVLRPFIHKFDNETNKKQRFIFRIDPRNIRQIWFYEPEQKQYFKIPLANPSIPHMSLWELEEAKKQIKEFGFTFTEEQLIETHREMQAIVEASVKKTRSARRKLAKSKINKEQATPESKTSPLPQPSQQQGLDDDLWDDDIPIFD

SEQ ID NO: 5508 - protein, 236 aa, synthetic construct
  REGION 1..236: note = TnsF-Tn7 System Protein
MKLTESVALTSVNVSGQTPRPGALSLAHHGVIFFDEMPEFKRDVLEALREPLETKQVNIARVKQQVSYPCNSLLIGALNPSPSGYFADDPRCKETPDQILRYQRKLSGPILDRIDLHLQLPAVDLAELAKPQQSISETSQTVRARVAAARARQQTRQGCLNSQLSAQQCQDLPIAQADRDFLASALTKLGLSARSYHKVLRIAQTLADMNAAEQISRGHLAEALGYRNLDQLGGSQ

SEQ ID NO: 5509 - protein, 357 aa, synthetic construct
  REGION 1..357: note = TnsF-Tn7 System Protein
MNSHRLWPILIPIEDDELLSSWLIRNALANGSDPMTWTWYFWGKWRAWTLDFDRYCPDVMLYRIANAPFDINTLRKATLLSIAANINSAQLNPKTNWNWVIPQGSRNRDRSTGLRCCPECLNEKAYFKKSWRLAWNHSCPTHKTILLDKCPNCGLPISPHKANQDNPDICICPRCQFDLRLAHSKPANSRALNAQLLLNNAINHEGSVSFAWGTNETKELFSTVHLMLRFLHFTCTHPATLTKFRKVMCLPVMEQEFIMGVSIEQYPPDWIHTLFCALDTLLSMEIKSLIKHLAAHDVTQKMMIKNKTNLTETFAFIASKLRSSETKPTTVIRARTPIKPKSKDEVDKMWLDIQRYL

SEQ ID NO: 5510 - protein, 303 aa, synthetic construct
  REGION 1..303: note = TnsF-Tn7 System Protein
MTEQYSHLHESVHEVILQGKQERIDYMNNPLWINHNRSTQVIQLLNQLLRNPKKPRMRNLLMIGEPNIGKTSLIKYYSNLHPSYTSEDEDGISRANIPLIVIDAPTLESEKALFVSILEQFWTPFNPEHTPLRLRNQVISLMRECNVRMLIIDEFHNLLTFSASKRLKTIGILKTLGNELMIPIVAVGIHDAMTLINSDPQIASRFDTLTIPRWDLDKNFRGLLLAFEKRLPLRKPSRLHEKDKTVLLHNISQGNTGDLHRLLIECATYAIENEIEEISTSVIQKFSWVKPTHASYSRQLQIS

SEQ ID NO: 5511 - protein, 303 aa, synthetic construct; identical to SEQ ID NO: 5510
  REGION 1..303: note = TnsF-Tn7 System Protein

SEQ ID NO: 5512 - protein, 493 aa, synthetic construct
  REGION 1..493: note = TnsF-Tn7 System Protein
MVSTEVGRETGCHECGRAMVKAKKVHNQCRYCDNCYARLFKRRLCSVCGNFRRLPTFDPTARCGPCERAGSCVRCGKTEFAIGMRSDYGPVCKSCVPYFREPEPCQVCGRLSQRLAVGTKTGLRSCNKCRQPDGATCPSCRRHRVLIVDQVGVSRCKACCGTSERPCETCGTMMPAGRGKTCEGCYWTALFAKRVVVNSAGFTSPRIQQLYEAFSQWLLSRSGPHKAALTINGYYSFFAKLDEQWGDVPTYDHLLAVFGAAGLRQAENPMRWLQHIGVVTVSAERREEHSEQRRVSELLSELSDFWSNQLLHGYHAELVQRFERSETDLRSVRIALRAAVSFLKLAELAPQALPKTKALEAFWRSSPGQVAAVTGFVGFLNRAYSTELKARPEKRWLEKARREKAERELVALLDGANVASEPLWIAKALAYFHNVRRVNRKILVYRAESFNGAAGYSVEHEGQSLWVPSATTYIRDPAGTRATPEQHPPGRRR

SEQ ID NO: 5513 - protein, 580 aa, synthetic construct
  REGION 1..580: note = TnsF-Tn7 System Protein
MSHPVKRVKFDYPRADLRHLKSGVVKLKDDHIVWWYNSIRANTRGERTIPEVEVMFKKLKDDVPSSGITWASVPLTALPHYRIGSIWRDGQCISDTEMEVKKFDIDFSPEKWVITSRAELLEQGQGNIFHEDDYPLKFSRDLSTLLNFSLPGGKNLIVPCIEYFVRAYARNMAVCKALSTLTLREVKSVFFKCQQRDAFRWLIKPTDAMRNADAIFLAHFLYDNYTENQVKRLNTSFVSKGPNIKVFPDVAPWFLGDGKLLCRGHWINQGNTFLCLGLLGSTQPQGQEIELFRETFDSNGGEEGGRVVLPQVVRTARAEEFLTEESAVVPDAQGERVIVKPPPFETLGPKRAVKKIKSVRESNRGVRGPQPPETDSYSSGDGAGDGKGVGKSEHVSDMVLESQGFLLDIWNAFLSIKRDNPERVSEVSWYTPQHYGTSSPPRIILFNRSGLNWNDHAQRQWIYLEPGRAQLRGFMILKVVVDDQSFFCFEIERQEPSEKHPNPRGFSGVLMKAHTSDPVEFQQFVEEVCTRIRNNLGIFKNIMRSFPKETIVFAHRAQDQDVRYRRRLINVFAQAGVVLE

SEQ ID NO: 5514 - protein, 493 aa, synthetic construct; identical to SEQ ID NO: 5512
  REGION 1..493: note = TnsF-Tn7 System Protein

SEQ ID NO: 5515 - protein, 172 aa, synthetic construct
  REGION 1..172: note = TnsF-Tn7 System Protein
MIAQPAEVDFIDPSGRRNTYTPDFLVYFHQGDVFPEEYIKPMLVEVKPAYEWRKNWRVWRGKWKAARRYARQEGWTFSIYDDSRIRGAALENIVFLERFERYTFDKEDIDMVLNTIRGMEIAPVHYLLARHFNGIYRGRGVSLLWHLIAVGLVHCDINEPLNEYLELWVPAP

SEQ ID NO: 5516 - protein, 642 aa, synthetic construct
  REGION 1..642: note = TnsF-Tn7 System Protein
MNIYEEDTEEHHQPFEPSRARVSIEVGAMVRRGKEIFRIVQIIDFQAVIGLEVETGKCTSLRVPELRAVEQDKLDGLYVNHDVSTISSDDWAIAQKRFSAIQPFINHSIVRRDSVEERAKEIGVDTATLYRWLERYRNWHEVLALVPRKRGWKAGGSRLTIQAEKLISNVIDEVYLNTERKSIPFCIREIEERSKAMGIEPPGASAVRARIKSIPPKIVLRRRGYVDKANNRHTPSVGRFPGADYPLAVVQIDHTPIDLIIVDDRHRKPIGRLWLTLAIDVHSRMITGYYLALEEPSAISVGMCLAHSFLPKENWLLLHKVEGEWPVWGFPRIVHTDNGADFKAEDIRRSCSNYNIENNFRPKKNPKYGGHIERLLGNFMKMLHDLPGTTFGNITDREGYDSDKHSALTMDEFERWLVMSIILYHNEVHSALYMSPSRKWHLGFFGNRELDPLVCIPPRPADPHTVQLDFMPLYERTVQTYGVQIDVFYYSDALRHWINTKDPETGLARKFVFRRDPRDISVIWFYDPVLKQYFRVPVANQAFPAATVWEFRAAKQQAVDEGRKHIDEALISKIIVERRAVVEDAVSTTKKTRRAAQKNKVHSKNRTPAQPSKPFSNPAPVPVPPAVEGLLLGDVEFDGVIQ

SEQ ID NO: 5517 - protein, 201 aa, synthetic construct
  REGION 1..201: note = TnsF-Tn7 System Protein
MLFLDELPEFDRKVLEVLREPLESGQIVIARARDRVHFPARFQLVAAMNPCPCGYLGEPSGRCRCTPEQIQRYRNKLSGPLLDRIDLHLTVARESTALNPKPPAGDNTAQAAALVARARERQQRRQGCANAFLDLPGLRRHCQLSTTDERWLETACERLTLSLRAAHRLLKVARTLADLEQVEQISREHLAEALQYRPAAS

SEQ ID NO: 5518 - protein, 373 aa, synthetic construct
  REGION 1..373: note = TnsF-Tn7 System Protein
MDASYTWHPASRGLNPRWPLTPQILPDELFSSWLVRTALVHACTPETLTDCAWPNSRIWCIDLDRGLGERRLAILERLTGLSVSDLVASTLVPVARALHPEAFLQTSNLWPWILVLGCRNHFHAGGLQCCPECMDGSVPHYLVQARLAWHTCCPLHRSLLVDRCPRCFSALQPGLLHVGDSLAQCHHCGERFSALSRRLCSNEALAFQGFADELYGKRTAFGQAEVNFAEWMFIARVIISLLRSIVRHPTASSRLFCRLMSVDLAGCSVSSLGLPLEYLEPAERCALIGPAWVIMQAGAERFIECARLASLPRSLLPIPARDAPEILTHMASALTCRPRCSPDMTERNQTRDPLSVWRMWLRLQRRIRRDGLH

SEQ ID NO: 5519 - protein, 296 aa, synthetic construct
  REGION 1..296: note = TnsF-Tn7 System Protein
MKDYAHLHVDFRPVLDLTDRERILFMGEPRWIAYKSAVNILGTLDSLLEAHKRPRMPNLLLVGDSNNGKTTLIRQFLKLRGEGYANEDNEPVRPVILAESPTSADEKELYVAILEQLWMPYRATDTKVKLRYQVTHALRELKVKMLIIDEIHSMLTGSAIKQREVMNALKLLCNTLMIPIVGVGTPDAVQILHIDPQHASRFDVIKLETWKLDADFQRLLKGFEMILPLKKPSNLFQPELAQLLHSISGGNTGDLHRLLIECATEAITSGKECIDRPIIESKSWTRPTRGIRHLVV

SEQ ID NO: 5520 - protein, 296 aa, synthetic construct; identical to SEQ ID NO: 5519
  REGION 1..296: note = TnsF-Tn7 System Protein

SEQ ID NO: 5521 - protein, 271 aa, synthetic construct
  REGION 1..271: note = TnsF-Tn7 System Protein
MGAHKAALKLKHYVPFFSFLDAHPAGLPSYVSLLENFGAEGLRRMQTPMLWLNTRYGVAADEQLRKEHSEKRRIQEMIQSTPTGVCLDALLGYWAYLRAKQADGSTSISSVRLSLRAAKNMLASASKLFDTLPTQQMVTAYLTQTPGQRAAAHGFIGYLNRTHTLSLTTEVSERAVARAKIHKLEAKLYALYAKGGEGEVFERTWIKHALMLVHRVKNVNKKTLAYSVLTQQGVDGFSVALNAKVYWVPGPSSAPSLVTQPQEMPGGDSDV

SEQ ID NO: 5522 - protein, 580 aa, synthetic construct
  REGION 1..580: note = TnsF-Tn7 System Protein
MSHRIKRVPPRENLCTTKDGEAIDHIRNGTVVVWSYERIKKNFEAESIPFVEVIFRFLDRNDEPAGVTPALIGISRLGSFRLGTIWRGGKCIAETDLGKDEEFSVDFTEGAWSYVSIQGNHQPVPYFKTDYPLRSQPTDKVLTEFLSFPLPDGKKNLLIPCIEFLYRCYGSTSDMARILTTYPWPKVQELLYTDTRKDFRTWLVKPHPNVPDDDGLFLAHALYNDYTERVAKLLYAELDNAHGKHMKEASLRVRPWFQGPARVQVRGRWINNRNTFLCYEVTGMSQPQDHPYEISRVTYSKDDTEQDQPPLDTIRVKIETPKPQDPFVITDHQEPDQGSVRWSKPDPGFQILGPKCPHTVSFDERPLAKKTAILIPPSTVKALSTGDPQGYNKGVGKFTAVAKRVVGDGGALQAVWDELQRLKGGKHFSSVSWLSEREGFVQSTDFRLLALPAFTQSDSPTDKNRSWLAYKENANRRRGILVARIKIAARSFYLFELQRKKIRTGTVYGDQKMSGLLIEISNEAEALDEISRICAEIRFANGNFRSLKTRLRPTHNIFRHHREVDTTLFYAFYHLGIRLL

SEQ ID NO: 5523 - protein, 271 aa, synthetic construct; identical to SEQ ID NO: 5521
  REGION 1..271: note = TnsF-Tn7 System Protein

SEQ ID NO: 5524 - protein, 222 aa, synthetic construct
  REGION 1..222: note = TnsF-Tn7 System Protein
MDSNSCNQPQFSVARRIKSTTRSLSGVFAFRGKGVAFESMLERDFLSRMDFRKDVLTVVSQPVQLDFVARSGRSYTYTPDYLVHFHSHAQLLPMLVEVKPAENWRENWRDLLPKWKAALRYAKERGWRFHIYDESRIRGQSLRNIQYLERFKNADYADQDLDAIVRTVAFKGIASISYLLALHFQGAEALGKSHIFHLIATRQLDCDISGPLSDSLEVMVAE

SEQ ID NO: 5525 - protein, 639 aa, synthetic construct
  REGION 1..639: note = TnsF-Tn7 System Protein
MNEYVSEQPQSGKIDRSFVNIAPGELACYQKDVFRITQVLDFQSVLAISVETGQPKVLQIGELKPFLGDKVRGPYADYDLEDIGVEEWAIAQKRYAVLAPLLGIDGQSRSVVEQRAKDVGVDVVTVYRWLRRYKEQGEVTALIPLKRGWGKGRSRISEGVEKVIAETIDDFYLTEQRPDVASTVYEVRKRCKALKLSPPTVSTVQARIKRIPDRIRLRRRGDKELAGNKYDPRPGGLNTEYPLQIVQIDHTPADMIIVDDIHRRPIGRPWLSLAICVYSRMVTGYYLSMDAPSAVSVAMCVVHSILPKEKWLALHGVDAEWPVWGKMGTLHSDNGADFRTNSLVQSCVNHNIRRDFRPKKNPQWGGHIERWMGTFAGINKKDRGATFSNPAERREYDSEKQSIYTFAEYEQRLVRNLIKYNNKFHEEIDMAPIKKWNLAFFGDKEHDPIVPLPPRVADPWGFQLDFLPATLRTIHPYGVEMDAMYFAEALRPWIGATDPKTGKARKFLFRRDPRDINRIWFYDPALKEHFEVPIIRGRYAGVTVGEYVKAKKKARKAGRDAVNHDVIERMLDENKQQETEAAVRTKQARKSAQKRTNNTKQTTPARPTPHLEPKFPPTGLPDSPQLLSVDEVDTFGEVW

SEQ ID NO: 5526 - protein, 350 aa, synthetic construct
  REGION 1..350: note = TnsF-Tn7 System Protein
MPPLLRNEVISSWLMRCALAQGCDATTLTSEVWPRLRFWCSDPDRQLPLEQAHRLSRLSGVPPAALQAATLQPLYQTMTGTPSFPKGVAPWFLCLGCRNRRRCGGLQYCPECFKEHVPYYSIQDRLAWHSTCPMHQVILLDRCECCQAPLCPQLLTPPEETLDKCHRCGYQLSFAVTVAGPVNALHFQRATDELFSRPTMSYGSHYLPLAEWLALSRWMIGILRTAARASSPCTETFFRELGVDLGKLTPPSTGLPLEYLSAVDRAGLLADVWSMLQIGHERLIEVAEREHIRPSLLLPRSGKLPPSIAGLAAVLKSRRCGNNSVPPIDNPRSVKSVLMRWQRLLRKFQR

SEQ ID NO: 5527 - protein, 669 aa, synthetic construct
  REGION 1..669: note = TnsF-Tn7 System Protein
MPAIADAFLKNRADNLPPDVSQEFIVPHFFQQISIFKDSKSVRVLGGRGCGKTMFLRYFCHGSTFSSHRPQINDDEFAHIGLYFRPDTGFCSLITPEWLGNQQDGVAFSHYLTLCLLAEVTQALQKISDAKNLANGPLSLSGITLSQKMVRLMQLKEPTVEALAEVVDERLAELDLWVRNPGRCPTPLFVHFTTIITALADDLARHDPRLKSLGFRVFIDEFENLLVKHREIVCDAIKHPSSRLAVHIAHKREAVTDFKTSGEERVVEVHDIRTIDIEALLVNDNDFEVMAAELFLFRLRQAEVSVSCSAFKPELLHDVAYLPYRSTPSYRQDVVAYTKQIFPELRAPEIARVALQDPALRRRVVDMIQRGLNFQGLTGVVGAEDLISESVPEASVVLGAILNRKSQSGKEALGLFQDVVDKGRSKTDAFYKTGGWVDNNLYGCLFHLYAGLTKRPNILYAGFSRFCKIAAPNLRFFQELCHNALLQAYQRRSAEEIDGAMCIDLDSQANAAVHVSDAMFEDVVQLGPHGDRLLDFARRLGGLFEKFNKRRSQSEPEINHFSINRADTAQLSEAAQVILREAKIWSVLAESKGTKDKAEYDVTQYELVLNPIYAPHFRISYRKRRKITLTASQLDIMLTQSDSQFDSLVRQLVDSQDDEETAKKTGSLF

SEQ ID NO: 5528 - protein, 669 aa, synthetic construct; identical to SEQ ID NO: 5527
  REGION 1..669: note = TnsF-Tn7 System Protein

SEQ ID NO: 5529 - protein, 297 aa, synthetic construct
  REGION 1..297: note = TnsF-Tn7 System Protein
MTDFAHITPQFRDVMQKSDLDRLAFLDEPRWVDYQAANNLMDILNGLLRKPERPRMPNLMLVGESNTGKTTVVTRFKELSGQPYISDDAVSVRPVICAEVHKPDERELYNAVLREFWAPHNPVAPLEKLRHQAIHLLRNARTRMLILDEVHTINNGSAAKRMDVMNELKMLSNILHIPLVLVGTRTALQLLVLDSQYSSRFEVVSLPNWLVNVEFQRFLKSFESVLPLKSASKLYSPELTPLIHAISNGNTGNIEYLLRECAREAIRNGSEVIDRRLLEKNQWMRPTSADGVRERVL

SEQ ID NO: 5530 - protein, 297 aa, synthetic construct; identical to SEQ ID NO: 5529
  REGION 1..297: note = TnsF-Tn7 System Protein

SEQ ID NO: 5531 - protein, 291 aa, synthetic construct
  REGION 1..291: note = TnsF-Tn7 System Protein
MSRTRVRTEDLFCARCRRAVQLKANHWPEGYLCGRCFGQALETYGTCAGCGVDRLTPGIAADGGKLCTDCAGGLGDFTCERCGQEARRYRRGVCGRCVLAERLHELLDDGSGSIRPELLPLFDMLRQVSRPWGGITWAKLPHVQRNLLALARGHVPLTHEGLSQLMPWRSVAYLRDLLMQSGVLPPADRHLLLFQRCRAEKLSTVSDPEHRKLLELFAAWHIERRLRALAGRGPLTGSQTQQARNEIHLAIAFLDHLAQRGRALADCTQADADTWYAGGYTARRLTHAFLR

SEQ ID NO: 5532 - protein, 291 aa, synthetic construct; identical to SEQ ID NO: 5531
  REGION 1..291: note = TnsF-Tn7 System Protein

SEQ ID NO: 5533 - protein, 108 aa, synthetic construct
  REGION 1..108: note = TnsF-Tn7 System Protein
MKRQVSYQWRLRERMAAAGVFTTSELAPPLAERGINLSLSQVHRLVTGTPERLSLPVLAALCDIFDCTPADLIATRAENTAIRKVATGDAVVDLSAVRPKRARIRPEG

SEQ ID NO: 5534 - protein, 776 aa, synthetic construct
  REGION 1..776: note = TnsF-Tn7 System Protein
MSRRSRSAALDRVVTVMVRQLPGLDKDAALEALVASRCHGWRGLKELDEHLAEHPGALKDGSSRVPKAVFRLTRTLHAGGRRDVVLTPCGSCGTTTRVLPHLDQSRARICEPCYTRANPRECIRCGNWGRIMARRPDGEICHNCYNADTANLKACATCGHRRPAARRLPDGKVLCQRCAPMPLHTCSVCGTTAPAWAITQDGAMCRKCYRTPGRLCGKCERVLPVARRATANSPDICINCYRGPTRVCSVCARRRPCNLDRTTRQPTCAGCHARPRRGCARCGRTREVQALWPLGPVCNTCYQWVRKNPGSCSTCGTYRALVGVTEEGAAACGPCSGEDIEYTCRTCGRAGYLYVQGSCDRCVLRVRVRDLLARPDGTLSEQLRGVVAALDGVPHPDRTLRWLRGSRAAELLISIAQNEGEVTHHLLDGMTPGPALNFLRGLLVHAGALPERDEYLERIGPWLNGVLEDCPVHHVRLVRPFVQWHVLLRARRNSNRHGFTDAAGAATRYRIRVALRFLQWLDERSVPFEELSQAVLDEWLHSNGSRRSVNEVRHFLGWAASRRLVGQITVPTVPQRQPENFLHEADYADQLRRCVSDSEIPIDVRVLGSLVLLFGVPIKNVLSLSTEDVMRKVDGTYVKLGGKPLLLPPRLAILLHGLAGSDLRRASIGRAESERYLFPGMVPGRPATATSYVRRLNSYGVRIRPARNSARLALATDLPASVIADLFGMHIGTAVRWVQYAKRDWLDYVAERAGARDGKASAHEIVAPNELPPQAG

SEQ ID NO: 5535 - protein, 776 aa, synthetic construct; identical to SEQ ID NO: 5534
  REGION 1..776: note = TnsF-Tn7 System Protein

SEQ ID NO: 5536 - protein, 375 aa, synthetic construct
  REGION 1..375: note = TnsF-Tn7 System Protein
MSGGADLPGAAHLVLADGVAHLDLETAVFNAMLEGWARQQATRFLSSDGTIQPRISLVRRFASFTNEYPWQWDSADVEEFINHLRARRPSFAVSTGRGYQNILRLFCEYVTDARYGWPRKCYEHFGEAPVQILHEWNTVTHSSDYEGSPGRRPLTYDEVQGLFDAADGRVEEIRKRRRKGALAAMRDSILLKSVYAYGLRRREAAGLDVADLRRNARMPDYGRFGALFVRYGKSSKGGPPKRRTVLTVPEFDWIVDALDQYVDEVRPLFQPGKHPALWITERRGRISLRRVDEAFETARKVAGIPEELDLHCLRHSYVTHLLEFDYPERFVQDQVGHEYASTTAIYSGVSDEYRNRLLHRSLKGRHSALWGHCFD

SEQ ID NO: 5537 - protein, 506 aa, synthetic construct
  REGION 1..506: note = TnsF-Tn7 System Protein
MTTIEPRRRNTVRGRPKATDGQLECVRCQRHMRKAAVTWPDGKVCNSCFYDATSLFGSCPSCGMERMLPGRLEIGDQPVCRDCARIRQDYHCRSCGQEARPYRRGICARCTLRADLEHDLIRDDTPSEVATLIHALCSADRPESVLTWKRSAKVQPLLSAVASGATALTHEGLDAYEPTGRHVEHLRSILVHHKALPPLDKYIAYFTRWLEDKLAAVENDEIKRPVRQFATWHHLRRINELALAGKPTRGPVHTSKQEITETLRFLEWLDAEQGRTIATCVQQDVDQWVMPGPTTRHAIRTFLIWAAKSRINRSVTLGFRQARSVRLLTQEERLAWIQELLQGDSESLPYRVAGTLLPLYAQPLVKVAEFPMEKVVITPDGLALQLGDPLSPVPEPFSALLREHISRRPNLRTTGAGSPWLFPGFRPGEHIHPNTLMDRLRSLGIDLLGARNTALRELVAQVPAPVVAEMLGYSDQVTQRHASLAAGPWQRYASTDPRQVGRRDTS

SEQ ID NO: 5538 - protein, 506 aa, synthetic construct; identical to SEQ ID NO: 5537
  REGION 1..506: note = TnsF-Tn7 System Protein

SEQ ID NO: 5539 - protein, 369 aa, synthetic construct
  REGION 1..369: note = TnsF-Tn7 System Protein
MAVDDVGRAYLVSAVRPLHPEEQTIAEMLQGWRNQQLSRNLRFETIDARIKQVERFIDHSNEHPWSWTVAMVDEFFGDLRSIHSLSQSSIRAYQVGLRQFCSYISNPDYGWDRVCEELFGTHPSQVFFDWNTAQHVQENESRPDKRAFTKREIQDFFDHADDQVSTIAASGRKGWLPAYRDSVMFKLAYSYGLRFNELAHLQTVDFARNPHAKEFGKFGVVNVRYGKAKKGSPPKRRGVLTVFDWTPEVITDWLANGHAHMDDGIDLFPSERGNLVSETTLIRRFRRYCDDLDLSPGLDLHSFRRSYATHLLEDGWDAMFVQHQMGHEHASTTAIYSCVSSDYRTRTLRNALDATLNAALSPTEKGGAS

SEQ ID NO: 5540 - protein, 956 aa, synthetic construct
  REGION 1..956: note = TnsF-Tn7 System Protein
MKPTGGLWVSRNLSSQARARVKISGMGWRAEGRTLIGREGEQQQLAELCDRARAGESGVLVIHGEAGIGKTVLLAVMLAGAENGCRAVRIVGAESEMELAYAGMQQLCGPLLGLIDGLPDPQKNALAIALGLREGSAPDRLLVGLAVLTLLGDAGAERPTVCVIDDAQWVDHASLQALTFAARRLLADRVVMVFATRTPEARPELNGLPDLKLDRLTHADADRLLSEVMPGQLDQTVRENILAEADGNPLALLELRHAMVPAVLAGGYGLAAATSVAKRIEREYEQRLHELPQATRTLLLLAAAEPTGDSVRLWAAAAQLQIDADAGVPAERAGLITVESRLRFRHPLVRSAIYRNATPSERRQAHAALAEAASDPAANEHRAWHRAHSVSAPDEAVAAELVRSAERARRRGGAAAAAAFLAYAVELTPDPRCRAERALDAALSKLDAGDPEAATQLLAAVAGTEDELIQARTDLVRAKIAFAAQRGRDAPPLLLAAAQRLQPLDPALARSTYLDALMAAMIVGRLSVEDGASATAIATAARRAPPPAGPPTAADLFLEGIILRLAEGHAAAAPVLQRAINQYLTEDAAGLADPRSHDITLRVLLDLLDQDTYNSINKRQLEQLDAAGELTVLPAALTTYAGVCVTAGEFEQAANLLAQSEAISTATGGPPHSSIQTYLAACRGQEDLARELARTTIEDATARGEGSEIAVVLFALAILNNGLCQYDEALAACTSALEYDDVGMRGHLVNEMVEAAARSGDTSTALSGAQQMLEFAETTGTATALGYCARAKALTATDSAAEDEYRTAIEHLERSPLKVMTARTHLIFGEWLRRENRRGEARKELRTAHDMFVQMGADGYAERTRRELQAAGGISRGDRSRTSTTTLTTQESYIARLAGDGYSNSEIASHLFISPRTVEWHLSRIFAKLGLSSRRELRKAGDQRPKQARGKQFSES

SEQ ID NO: 5541 - protein, 956 aa, synthetic construct; identical to SEQ ID NO: 5540
  REGION 1..956: note = TnsF-Tn7 System Protein

SEQ ID NO: 5542 - protein, 111 aa, synthetic construct
  REGION 1..111: note = TnsF-Tn7 System Protein
MKRDVDYTWRLAELMANHQMHNSTDLIPRLNERGITLSRPQVYRLVHQRPERVSLKLIAALCDIFDCGPEDLVTVTAANARNKAASAGRENVVELNKAVRPRRARIISDDD

SEQ ID NO: 5543 - protein, 510 aa, synthetic construct
  REGION 1..510: note = TnsF-Tn7 System Protein
MSPRPRVIDPGNLKCARCHRPARLATREPSPARGKIITLIRNWPDGRICSGCYATATETFGTCQRCDTHRLLPGRGPTGELWCSDCAGIPSQACTRCGREGWLEHKQTCGWCVLGDKLTTALDDGTGRIRPELQPFYDRIIAMPRPRTGILWLNKPHVQPLLHKIATGQVPLTHDGITSLTPARSGSYVRRLLVAAGNLPDYDHYLDRFERWLPGWLATIPDPDHRQILTRYAKWHVHRHLRNAATNGTIGPYREQTARRQLRVAAAFLTDLQAAGRPLERCTQAHLDAWLVTATWSDTSTARDFLSWAIRTRIAPRLRLPRVRDNPAAVISQQRRLEILRRVLNDPAIPTVDRVVATLILLYAQPLQRILALRRPDITDGPDDLTINLAGTAVAVPAPFDTLIRAHLVEHATTIAPAANTGSDWLFPGRLAGHPIQPTGIRAHLQRLGIPNASGRSRALRELVLQAPPAVIAPLLGYKAEHAEKIAAEAGNTWQRYAAGAHTPLAGTNR

SEQ ID NO: 5544 - protein, 510 aa, synthetic construct; identical to SEQ ID NO: 5543
  REGION 1..510: note = TnsF-Tn7 System Protein

SEQ ID NO: 5545 - protein, 1836 aa, synthetic construct
  REGION 1..1836: note = TnsF-Tn7 System Protein
MSLHRITAGSGYDYLTRQVAAMDSTEKGHTGLASYYTEKGETPGEWMGSGMAGIDGLNAGDLVTSGQMQALYGSGHHPLAAERKAALTGRGLTEKDYVEATRLGQPFNVYDNDVSPFRIEVARRLEALNKERGLPRKASVAIEDRARIRTEVGLEMFRAERGRDPLDERELAGHIAKLSRQQTTAVAGWDLTFSPVKSVSTLWALADQQTAATIEKCHRQAVADALRFIEENALFTRTGHGGVRQVEVRGLVAAAFTHRDSRAGDPDLHTHVAVANKVQTLDDGRWLSIDGRVLHKAAVTASETYNSSLERHLAEALGVRFAARAGGDPRKRPVRELVGVDPALNELWSTRRHSIEARRRELAAQFQRSHGRPPTPVEAIALAQQATLETREAKHEPRTLAEQRAAWWEQARQALGGERRIQAMIHLVLRPDAKAGPRLDDAWLEEAAATVVAHVQAGRSSWQTWHLHAEALRAVRVAQVPAANLDRTVEAIVDRAIARCEALSRPVAGEPSEPDLLRRSDGSSVYTVAGSQLYTSAAVLAAEGRVVAAAGRRGGMVVPGTAIDLALLESEANGITLNPGQVLLVREMATSGARVQMAIAPAGSGKTTAMSALSRAWVEGGGNVLGLAPSAAAAAGLGDQLVGKTDTLAKLIWDLGHGAAASWKKRIGPKTLVVIDEAGMADTLSLDAAVDFILDQGGSVRLIGDDQQLAAIGAGGVLRDIQASHGALRLTELRRFSNPAEGMASLSLRQGETAALGFYLDQRRVHVGDETTMADDLFAAWSADRAGGLDSIMLAPTRELVADLNRRARSERLAGTTAGRTVDLPDGNLASTGDTVIARLNKRSLKLTATDWVKNGDRFEVMKVHRNGAIRARHLQSGRHIVLPADYVSEQVELGYACTTHTAQGVTADTMHGLLTGAESRQQAYTMLTRGRDANHAYVVVVGDGDEHTVIRPETLNPLSPTDMLERILARDESPVSATTQLRRAGDPRLLLGDACARYSDALGFAATHVAGDIGVRALERAVDDALPRLTQAATWSALRAQLLMVQADQRDPVEALARACAEPLTTAHDPCSVLAWRVAAAEWRGDRGPLPWLSRVPGQLAEHPTWGPYLAARSDLIAELADQVRTNTAQSATQPDWVAGTTGHPSAHLVADIEVWRAATLVPPSDTRPTGERRHGLAEARWQTHLETRLASTQTAALAEWSPLLNRIEPAVVVDDFAPVLAARLSQLSSSGVDAGRLLRAAASEGPLPDDHAAAALWWRLAKHLAPAVAQAVDTDHHISTAWLDDFTGRVGDISRDLQSSPWWPSLVTSIERGLQRGWPLERLLQETQTLTDAGHTDLCQAWVWRLSLLTDSHEQAEEDRDDPGQAPPADLYDGWEPSGPVVDAIADPAPMPSGEPAIDEPPVRYDEGDLTADDEQVLTIEGMIRRTMGAPDTTDADVRRMMERGDAIAESPVPAARLTQINELTATYYQRCLPGSWAEPYLTHRLRTDTTALDAVRAGYAPDGWTGLVSHLRRHGVTDTEMLTSGVAQTASTGRLIDRFRDRAVVPIVHDGAVLGFVARRNPGHSDDDNRGPKYLNTATTPVFNKGDQLYIAGSLEAGQTPVLVEGPMDAIAVTLAGGGRHVGVAPLGTSLTEQQVAQLHRAGRAPVVATDADLAGRVAAERDYWLLAMYNLNPTYAELPDGADPADLVATGQAETLNQAIANARPLGETLIDERLANLEGAESALDAVRVLAAQPPDQWTSGAQHIAEQTGLPSALIRSSLASMVRAWNANPRRAAEQAAYQASQVKDRLSAAATAQAARRNPEAATPPHPAEPRIEPAHTPTRSQRPGVER

SEQ ID NO: 5546 - protein, 1836 aa, synthetic construct; identical to SEQ ID NO: 5545
  REGION 1..1836: note = TnsF-Tn7 System Protein

SEQ ID NO: 5547 - protein, 366 aa, synthetic construct
  REGION 1..366: note = TnsF-Tn7 System Protein
MQLVLPAGVPLLHPETQVFEGMIEGWRNQMLARNLAESTIVAAVRVVRVFKAHHDVWPWLWTAAMSDEWFADLRSVRHIANSTVRSYQVALRGFCRYVTDPAYGWAEECERRFGTHPIQLINDVNAAAHVADVESQPRKRAFTRPELQALFDWADDQVEQRRMAGRKGWLPAFRDATMLKTAYAFGLRRTETRMLDVVDFGPNPAASEFGNYGALYVRYGKAQRGSPPKRRSVLTVWPWVVPVLEQWFGEVRPFLASDGPAAWPSERAIRITSPSVDALLRQARTAIGLDPVLDFHSLRRSYVTHLIEDGWDARFVQEQVGHEHASTTALYTCVSSDYRTRTLRRALDALVGEVLDDSPATARKGL

SEQ ID NO: 5548 - protein, 114 aa, synthetic construct
  REGION 1..114: note = TnsF-Tn7 System Protein
MTRQRRVVSYTWRLRQVMAQAGMFATTDLVEPLAERGVHLSTSQVHRLVTTPPERLNLTVLAALCDILATTPDELILVESANVPSRKVVNDAPTPRGDRVRPIRAQVVHDTDQR

SEQ ID NO: 5549 - protein, 429 aa, synthetic construct; identical to SEQ ID NO: 4687
  REGION 1..429: note = TnsF-Tn7 System Protein

SEQ ID NO: 5550 - protein, 341 aa, synthetic construct; identical to SEQ ID NO: 4685
  REGION 1..341: note = TnsF-Tn7 System Protein

SEQ ID NO: 5551 - protein, 429 aa, synthetic construct; identical to SEQ ID NO: 4687
  REGION 1..429: note = TnsF-Tn7 System Protein

SEQ ID NO: 5552 - protein, 253 aa, synthetic construct; identical to SEQ ID NO: 4688
  REGION 1..253: note = TnsF-Tn7 System Protein

SEQ ID NO: 5553 - protein, 338 aa, synthetic construct; identical to SEQ ID NO: 4689
  REGION 1..338: note = TnsF-Tn7 System Protein

SEQ ID NO: 5554 - protein, 113 aa, synthetic construct; identical to SEQ ID NO: 4690
  REGION 1..113: note = TnsF-Tn7 System Protein

SEQ ID NO: 5555 - protein, 108 aa, synthetic construct; identical to SEQ ID NO: 4691
  REGION 1..108: note = TnsF-Tn7 System Protein

SEQ ID NO: 5556 - protein, 470 aa, synthetic construct
  REGION 1..470: note = TnsF-Tn7 System Protein
MRANWPIGPVCDACYARRKRNPRPCTRCHASQVLVGRTDENRDLCGPCSGTDIAFVCNRCGFPGDIYADGACTRCVVGDRVRDLLSHDEKGGIAPALRPLADGLIALHPPVTVLRWLQKCAGPRVLAQLVSQRTEISHASLDVLPQDLTTRHVREILVATGILPQRQENLARLELWLDNILKQLPPRQKQFIAPFAEWSIVRDARRRAARGRYTTRACTHDRADIRIAIKFLTWLDENQLDLAAVGQEDLDLWLTTHPTLHRSIGSFIRWTTARHLTGQITIPTRRSGLPARFLGEREHHEQLKRCLNDEDLPLEVRITGALIGLYALPVTRLVEPTTDRFHRDQGSAYLSIDRNPVLLPPKLARLIDRQIARVAFISMLRQPHNDGPRFLLPGLPPTRPLSAGRVQVLMKRHGLAVIAARNTARIEAVADLPPIVISDLFGISPRTAYAWAQYAQDSWADYLAVSQDAE

SEQ ID NO: 5557 - protein, 989 aa, synthetic construct
  REGION 1..989: note = TnsF-Tn7 System Protein
MGAVQARPSPRLVGRGVEERLLADALKATAGGRPCAVMVHGEAGAGKTRLVREVCDAFGAEIQVLWGTCVHFGEASVPFAPVTGALQSWLAQADAQERAEVLAGADELGTVLPALGDASPGEPGRLLPLIDLVVNRIADRRPTVVVIDDLQWADRTSLDVLAYLITGFRDQHLALLATCREEHRGEGHPLHGWLADMRRMPLFSEIHLDRLDLAATETQIQDMLGRALDIDLAAQIYERSAGNPYLTELLVGGLSGDEPRLQATAPAALRDALLASWHGLSAAARQATRVLAVGGRPTDLAVLAGVAAEHGVEPGLLSGCLTEAQDHGVVRPDGDGRPWFRHPLLAEVLYDGMPPGERVKVHATYVRVLEGMPGGQDGRVAADLAVHNHHAGRVDDSYRWSLTAAGHAAELCATSEEAIHLERACSLWDQISPDVRGSRVGHVDLLRRASRVCGRAGRLDSAVNLVREALGVVDRDSEPLLTSTLLLAWCEATYRGSAPMKAGVDELVEAVQLTQAYPDNPERALALAGLAFAERWDKSYDSAAAHAEEAVQAARRSGSELALAAALSTRAFVHLHDVASNPLADTEEAVRLARSCGSTDWLEEAAIWQVRCLKHLGRVNEATAVAQEAFQEVLAAGSEWAYFLASHAAEGLLWQGRWNDCRELLRTALAARCGGIAGASVRLTAAQLAARSGRIAEAKLHLDRALNLISEDFAGLRGDLTLAGAEVFLASGEPQKALRWLKRRIVVPNAARPHYSEDILVEFAHAAAETARAARDAGDADGVAQAVATLDDLIAKWPAESFTAERPDAVDVAMFKALFDAEVARCRGQTGQADLWRHAIEACHTAGVPWEEAVSRLRRAEAMLAAGSRGSAVSDLLRQAHLTAVELGAQPLQEEVESLARMARVSLREPVSMPSMPEGPTALGGLTPREREILAFLVAGRSNGEIAKALVISYTTVSVHVSNILRKTGTSSRVEAAALAERLGSQRVD

SEQ ID NO: 5558 - protein, 989 aa, synthetic construct; identical to SEQ ID NO: 5557
  REGION 1..989: note = TnsF-Tn7 System Protein

SEQ ID NO: 5559 - protein, 281 aa, synthetic construct
  REGION 1..281: note = TnsF-Tn7 System Protein
MISYLSGMRSSPAKYFAALRRISRSSGSLARSRTLITRSLQLLAWLDDEGIALADLTQPTLDRWLAQDTRRHVHIRTFLRWAQHHKLTRKLHVPVRRVGKPSLFIADDDRVQQLRRCVHDTSIPLTTRVAGSLVLLLGLQISRILRLTTGEVSAEQGMVRLHLNGHQVDLPPRISDLVQQLVEQAEAAWHESRSASTTPWLFPGHNPARPLKLQSIVLQFRKHGLNGLAGRNTARLALAADVPASILAELTGTSVSNATRWAALTKRDWTGYLATRQEPDA

SEQ ID NO: 5560 - protein, 488 aa, synthetic construct
  REGION 1..488: note = TnsF-Tn7 System Protein
MARPRKPEAPQLWPVRCDRCRGHYQLVANWPGESLCGYCYQAAKRTVGICACGHEGVLPGIVNGRPACRPCSGVTLNVDCIACGAEAELYSGGRCQRCVLGDTATRLLTNPDTGVIAPQLQVIVDALTAMPRANSGLTWIRQKHVDQALRELARHATVTHEIMDQFPLGKTTNYIRSFLVEHKALPARDERLATFQSWAAAAQQRITTDEHQKVMARFIRWGLEKRLRSMATVTDSAFQRAKQTVTVTIEFCNWLTAEHAISIELPTQSHIDLWQASGPTTREHIVRFIRWAIATKLVASDLEVTPHRRGTAPRLPIGEQNAVIEKVVHQQTMHPRDRFAAILIIVFAQRAENIAALTWDRITIAAESVFVDLAGIPIEMPTPLDEPIRILAAANYNGQTAAHPNSPWVFRGHRPGTHLTPTHLRTRLRPVLAALEARLGTLNELTQTTPIAILAETLGYNPQTLEAHARASATTYARYMATRLDLLS

SEQ ID NO: 5561 - protein, 488 aa, synthetic construct; identical to SEQ ID NO: 5560
  REGION 1..488: note = TnsF-Tn7 System Protein

SEQ ID NO: 5562 - protein, 386 aa, synthetic construct
  REGION 1..386: note = TnsF-Tn7 System Protein
MARPYPREFRDDVVRVARDRDDGVTIEQIATDFGVHPVTLHKWMRQADIDEGAKPGKRTGESAELRDARRRIKLLEQENEVLRRAAAYLSQANLPKRLYPLVSELAADGIPVAVTCRVLKLARQPYYRWRANPITDAEVIEAYRANALFDAHKDDPEFGYRYLVEEASDAGEPMAQRTGWRICSQNRWWSVFGKKRGKNGKVGPPVHDDLVERDFTAGGPNQLWLSDITEHRTDEGKLYLCAIKDVFSNRIVGYSIDSRMKSRLAAAALSSAVARRGDVAGCILHSDRGSQFRSRKFVHALGHHEMVGSMGRVGAAGDNAAMESFFALLQKNVLDRRRWSTREELRIAIVTWIERTYHRRRRQAGLGRLTPIEFEAIMTAPASQAA

SEQ ID NO: 5563 - protein, 373 aa, synthetic construct
  REGION 1..373: note = TnsF-Tn7 System Protein
MIRTLGENVASFDGGLPDVSLLRADEAVFNAMIDGWRAQMLARGLDVNTIKARGRLISRFVEFTNEYPWRWRPIDADQFLADLRSQDSPIALTTLRSYSNMISMFCSYVSDNRYGWVSFCEKQFGDVPSQICFEWNTPQHTTDDAVPPKRRAFTKAELQHFFDVVDDFVDEAYRTGSKRWMTALRDSTAFKVGYAYGLRRRELVMLDLTDFGPNPHVPRFGNYGAMTVRWAKGTKGSGPRRRTVLTAPEFSWVVELLEYWCTEGRQLFATSDRSPALWPSERGARLTLNALGRSFTGFRERAGLPTELSLHALRHSFTTHLIEAGYDPLFVQEQLGHSFASTTSLYTSVGSDFKQKAIQQMIARRIRMEDSGG

SEQ ID NO: 5564 - protein, 118 aa, synthetic construct
  REGION 1..118: note = TnsF-Tn7 System Protein
MAEQRRIGFHWHLRRVMAAHNLWKSTELRPLLRSRGINLSDAQVYRLVTGEPQRIPSRTFAALCDIFDCTPNDLFEPYVEMQAAKSANAPRPSDLGITPGKPVAKRIRIVQDDDGPSP

SEQ ID NO: 5565 - protein, 432 aa, synthetic construct
  REGION 1..432: note = TnsF-Tn7 System Protein
MVCAACAGAESVFACRECGREDHPYGINRCARCFLRERLTDLLTDPGTGQIHTRLQPVFDELVNSERPQTGIWWLRKKPGTGPQLLGQMARGELDISHDTFRALPCDRAHNYLRELLASLGVLPAYEPRIERIPPWLDQKLAPLPADQADLVRRFAHWHVLRHLRNAARQQQLTKTMTDSARDRISTAIRFLAYLHAHGATAATATQEQLERYQTTHAVSLASEYTFIAWLRRSRINTRLHIPYVPNGAPAVTISDEQRWQHVERLLHDHTLRSYTRLGGLFTLLFAQPLSRIVAMRTSQVTITDNHADNEADSNVDVTFNTVPVQMPTVVDEIIRDHLQHRGQSLYASRGTGWLFPGGKPGRHLQTENIRAQLVAIGIKPHESRKAALFQLAGQMPAPVLAELLGITDTNAANWAKLAARDWTGYIADRAH

SEQ ID NO: 5566 - protein, 432 aa, synthetic construct; identical to SEQ ID NO: 5565
  REGION 1..432: note = TnsF-Tn7 System Protein

SEQ ID NO: 5567 - protein, 1560 aa, synthetic construct
  REGION 1..1560: note = TnsF-Tn7 System Protein
MDAEADLSAVASAQDARCIVLVYWEDIPVGCGFAIRVGDRRLLLTCAHVVNAALGRPVGDGEFPAEASLRIAPWFARDEHVQARVLPGGWHPISPDGSGDVALLEPHAPLSARIVPAPLRPWAARAALPFQVLGFPEGYKKVGQHAVGGMTGGFGPRGQWVQLDGETSRGARITRGFSGSAVWDTSTQTVAGIVVAEDLRDTTSPCGAMLPIEVVAQMVDGVREAFQVVAHPLSAVARHVGAFGELPLVGDVPASTIGATATAYDRHPAGGVYVERDLDAELQSAIAANTFVVVVGPSKAGKTRTAWEATRGACTDHVLLEPRDRSALVRLLSDVEAILDGRRVLVWLDGLERFLGREGERGLDLDLLDIAARRVPRWRVVATIRDKHHNALFREHEAAGTDWRRIDAWDATATFYLPVSMSERERVDAELAYPDEDFRGGVGIGERLIAGPELLRKLDDADNPFGWAIVRAAVDWTRTGLEEPASIDDLVRLADAYLDERFPLLERSTLREAIDWVKKPAVSHVALATVEERADLLVLRPLDYIVAAADGQGSRARLQIAADAWSLAVERSEGLELFTIFREATLRDDPTGMLAAAPKAREKLAPRLAAFAAAGLGSTLVDLDRSSEALDPLHQAVNDGDESIRAHALADLARALRHLKHHEETIEAYQLAIASNHSHTVESALIDLGELYEELGDNQSAITTYESAIARSEPAIASRGAFHKALVLRKSGEPRAAAAAALAAALAEPDAVLWIIAGSIAVEANQRESAAECFANAIDEANDRPELIAQAAYQRGLVLQDIHPELAEGAYRTSIERGMGKWSSASALMLANLVTDLPERVALIDQAARSEDSEVVATALVALATVSLERGDAASALDAAERCARLDPQLIGSEYATSLAAVFRTLHRPEQARGIFEQVRTIQATSSTDDATLGLADLHIEQGAFATAVDLLRPLADHSTAPTAARAGTLLGKALVELGEFERGIEAYRAAADQPGPDGRAARDRLGFTLWFADRPEEALEALRPLLDDSDPRLCAHSNLLTGLSLEPHDPQAAAQAFRRAVGTGHTHCVADAHLHLGEIAETREDREAAIDHYRAALEARITGTSTQAALKLKTLLLDRGERQEAIDLLTRAVPELESCGRLAYNLGILLREEGHLNRALLRFEDALAAAESDSDELMVGVAGRNLAALAAQNGDMDAYEDALRRTLDAGDRANSAAAGADLARRMIYRQDITQAIHLLQITISKDDESTAAPAWVMLADLLRMEGRATDAFTALKRAEEVDASGARLAEIELTRGALAYGSGDLDSAEAAFIRAAGLGPTEDVIATAAFDLALIRWDRGDRPGAEDDLRALFSNEVHAIAHASARALADRIQPDQPGAALAILEELAQQEPLCVHAQAAAVDAGAEYLERGQPSLARPLLERGMAGPVHAHAEVARLVLAELEHKDGNADEAVKGYRALHNSEYEHVARASRVNLGELLVEIGRLDEAEATLLPLFDAPTSEFQDQLSCVFGDLLLRRERYDESRRLLLDAADSDDTEVSGRAAALLADLKAATRAKN

SEQ ID NO: 5568 - protein, 368 aa, synthetic construct
  REGION 1..368: note = TnsF-Tn7 System Protein
MHLDEPSAVFEAMLSGWGRQQTSRLLADATIEPRLSLIRRFSEFAGSHPWDWTAGDVEDFTASLMAGDDRLAPSTIRGYHLTLRLFCDYLLDGRYGWVGQCEERFGAIPSQVCHDYNTAAHLVDYEGRPERRPFSYDELQTLFDFLDSRVEVVARSGRKGALAALRDAQMVKTAYAFGLRRRELCFLDVADLRPNPRMPQWGTFGAVHVRYAKSSRGSAPRRRTVLAVPEFDWAIDGLRQWVEQARPLLRPGPRHELWLTERNQRVSVKTIDKRFALLRAQAGLPSDLTLHCLRHSYVTHLIEFGYPERFVTEQVGHSYASTTAIYTSVSNDFKTKALQAALERVYGSHTTNTHNNMHNNQDGGRGQR

SEQ ID NO: 5569 - protein, 108 aa, synthetic construct
  REGION 1..108: note = TnsF-Tn7 System Protein
MVIGWNLRQVMAENGMFATTDLVEPLRQRGVEISRQMVHRVVTKTPQRINVDLLAALCDILDCTPNDLLELRHEQSRSASAAGETGPDRGPGIGDLRPIRARVRRPDE

SEQ ID NO: 5570 - protein, 304 aa, synthetic construct
  REGION 1..304: note = TnsF-Tn7 System Protein
MRSASPATTSSLANLPAHQARIIRPFAEWSILRDARRRAARHHYSIGAATNDRTDIRVAIEFLTWLDENQLDLASIGQEDVDLWLTINPTRLHGLGSFIRWTVARRLSGKLVVPPRRVGLPSNFLGDQEHHEQLKRCLNDDSLPREVRIIGALIRLYALPVNRIVRLTTDRFQRNEEEDRAYFSFDRNAVLLPPKLAQLIVDQIADPRYTSMVRQPPSTSESYLLPGRPPGRPRSEGAVLHLMRRYGLPVLSARNTAMIEAVADLPPIVVSDLFGVSAASAHRWARYAQNSWTDYLLACQDTEG

SEQ ID NO: 5571 - protein, 759 aa, synthetic construct
  REGION 1..759: note = TnsF-Tn7 System Protein
MTPPQRIDTTTAAKTRPSSGNGRKKPGTSTKKRAAGPVPIDWEAGHGTVSGTLAMAANAAGAAAFGTALGVPATWPLAVAAAGAVGHGLIAPLRRGATGATIGARLSGWAIAGAWSAGVIASDPRHWTGSGFGWAAGTLAAGSMLVYGLADEAELQEEARDEDARSAEKRQAHTARWAIANEWVDRIEQVTHVRVTPVALAMRPDGTGFALEVALPASITAARLAGFNVALAEAGRLPVGCMVQVVPTITQGHVLIDVDTEDTADRIQTYGDDFAQLSVLTGIPWYLNRKSQPVPVFLREACALLLGPPGSGKTTLLDTILAGFCRCADVVTWVIDLGKKGNAARAFLNPWMESQGLIPPPPGQDRLPEGIRPGVDWVATDAKTALTMLKVAKAISEWRMLAYAELMRRADTSLLPVSPRIPFIDIVVDEGVELLNSTTTFGRRGELREELISVMETCRAMAIRLTLTSVDGNLTALQDSRIRKYANVRAALTSTDLEGAGVAKLFEGRARGIDARQLEAPGSGVAEAKTSPGRFRPQPIRTFKTSPSFARAAVAATDSWRASLEPDAVRMIAAQFGKVYEQRWARENIGWLLGETTESQTPATPTGQTGGRAGLEPLPWRHSRGKDNAGKASEAKPLSEQEEDEIAAFHAALGNLPETDEPPAQPAGQPEPIEPSARPATAPDTPIAWRGKAVQILRGAGTDTWMSVKEIRDALADGGTDLARQTVSTALADMARRHQVRTRGTGSSTAYAAPEDANL

SEQ ID NO: 5572 - protein, 759 aa, synthetic construct; identical to SEQ ID NO: 5571
  REGION 1..759: note = TnsF-Tn7 System Protein

SEQ ID NO: 5573 - protein, 488 aa, synthetic construct
  REGION 1..488: note = TnsF-Tn7 System Protein
MSTTWKPQCDSCRRHVEARYEILEQRICNACYTRLRWNASACPACAQTKVLAFRSPDGLVVCAACAGVPSRFGCATCGSEQHLTGSHCGRCRLEDRLGDVLSDTTGQIHPELAPLREHLLTARDPRSATRWLRHEPIDRTLRDMAQGKKPVSHHTLNELPQSTRVRYFRHMLISSGTLPNIDVRLNDLELRTKALTGSIPPAHAAIITRYFNWEILRRLRRRTGGQPISAGVVNTRTAEIRKIVAFLTWLDNHGQPLASLEQVTLDHYLSRHDRHKTLASFLNWAVRNRITTRLRVPRKQPSPPPAPIPEDVVWDKVDGLLNDESTPLPSRIIGLLLLVFAQPIRDSVRLRLEDIHRNGEVFSLKFGSTPIELPAPITDLLRRHLDETRARQPYVGEPSGWLFDGTMPHQHTSEGGVALHLARQGINAREMKRARLDQLAQVLPASIVADVTGVAVETALRHAIDTSANWGIYPELRASEHGQLNANE

SEQ ID NO: 5574 - protein, 488 aa, synthetic construct; identical to SEQ ID NO: 5573
  REGION 1..488: note = TnsF-Tn7 System Protein

SEQ ID NO: 5575 - protein, 290 aa, synthetic construct
  REGION 1..290: note = TnsF-Tn7 System Protein
MNNTMPAAPATDDVAAHLGESSPGTHLERPDNPIMACEDVDIFYGDFKAVSNVSLQFGFNEITALIGPSGCGKSTVLRSLNRMNDLIEGARVEGTITFRGEEIYGKKVDPIEVRRRIGMVFQKANPFPKSIYDNVAYGPRVSGMKVESMDELVESSLRAAALWDEVKDKLKDSGLGLSGGQQQRLCIARTIAVRPDVILMDEPCSSLDPIATLRIEDLMHELKQDFSIVIVTHNMQQAARVADRTAFFTALSAEGSGDRTGVLVEYAPTRKIFDDPADQRTEDYVSGRFG

SEQ ID NO: 5576 - protein, 290 aa, synthetic construct; identical to SEQ ID NO: 5575
  REGION 1..290: note = TnsF-Tn7 System Protein

SEQ ID NO: 5577 - protein, 408 aa, synthetic construct
  REGION 1..408: note = TnsF-Tn7 System Protein
MARVTNPFTPGFGQSPAILAGRASVIREFEQAVAGELPGQRNVLISGARGAGKTVLLTEFEAVAADAGWTCITLHTASSSLVAELRAEIVEHLRESDPQAERSRLTGAGLSGVSAQRDVVERYDGEALPVGRLLDRLAGILDATGGGLLITLDELQSVDPAQLHEVTQHVQDLTRRGHQVGFVAAGIRAGLDDLLENDKTTFLRRAHRVELGSVPVGTAAETIRQTVADTPKTITPEAAVRAGEVSQGYPYLIQLVGARAWTHAGNADTIEIGDIEQIRTEVIREMVKNVHRPALREISGRKLDYLNAMLEDTGPSRVADIAARMGEDRRYQSVYRERLIHDELIHPAGRGYVEYALPYLRDALEALRAGTAPVPGADEVTRTRTRLPASRSRPETRDRTTRDNNRRP

SEQ ID NO: 5578 - protein, 408 aa, synthetic construct; identical to SEQ ID NO: 5577
  REGION 1..408: note = TnsF-Tn7 System Protein

SEQ ID NO: 5579 - protein, 371 aa, synthetic construct
  REGION 1..371: note = TnsF-Tn7 System Protein
MDPNTGGATALRLLGNVRALDEKQFVYEAMLTGWSDQQSSRGLATPTIRNRILAIRRFESFTERYPWEWAPVDVEDYTTRAKSKARPAAKSTIRAFQTIIRLFCDYLCDGRYEWARECERRFASAPQQICHVWNTTAHLVDYEGRAQRRALTYDELEQFFTAADARVESILAQGRKGALAALRDAQIFKTIYAYGLRRAEAVGLDVADLRPNGAAPRFGRFGAVEARWGKGTRGSGPRRRSVLTVPELGWVTEGLAQWVDQARPRCTDEPTGKLWPTERGSRVSLRYIDLRFATIRDQLGLPSELSVHALRHTYVTNLIEWGYSEKFVQDQVGHAYASTTAIYTSVGDDYKTRMVTRALSRIYGGNDAHNR

SEQ ID NO: 5580 - protein, 115 aa, synthetic construct
  REGION 1..115: note = TnsF-Tn7 System Protein
MPTTADDNPITWQLRQVMAAAGMFQTTDLIEPLREQGVQLSREQIYRLVSKTPERLNVEVLAALCRILDCTPNDLIEVAPAASCGNRRAAGEPRSAGPAIGALRPIPAKLHRLTD

SEQ ID NO: 5581 - protein, 306 aa, synthetic construct
  REGION 1..306: note = TnsF-Tn7 System Protein
MPTRNDPLARVERWLANLIPSLPAHHSRLIHPYAQWSVLRRGRRRAKRGRYTGSSAAHGRQQINTAIGLLGWIDTQGHTLADLSQVQLDNWIDGDHSRSKLIAGFVKWIAEHHLVPRELRIHHRASPDPSNLPDADEHLDALRRLASDDNALPLETRAAGLLVLLYGLQLTRLQRITLDQLEDRGGQMYIVFADNPVLLASPVAAIVNELATRSASQNEPTTGDRYLFASRRRPGAPLSTSALGFHLNRAGIFAGIGRSGALAALAEDLPAPVIADLLGVHINTAVRWTRVVQRDWSHYLAARHST

SEQ ID NO: 5582 - protein, 306 aa, synthetic construct; identical to SEQ ID NO: 5581
  REGION 1..306: note = TnsF-Tn7 System Protein

SEQ ID NO: 5583 - protein, 369 aa, synthetic construct
  REGION 1..369: note = TnsF-Tn7 System Protein
MCDAPGSAHLVLAENVVHLDPKPALFDAMLTGWARQQRSRFLQERGTIAPRERVLRRFAAFTGLYPWDWTPSDAEAWISELRSGNSPLALSTIRGYEVMIRLFCEYLIDQRYGWVDICTEQFGNAPDLIFHEGNSVLHVAEYEGDPRRRPLTYDEVQALFDAADSRVETIRRTGRKGSLAAIRDSAMLKFTYAFGLRRSEVARVDIVDLRRNVKAPQYSRMGSVSIRYGKASRGGPPKRRTVLTVPEMDWIVEVLEHYLTDVRPAYDPKKHPALWVTERVTRISGRAVNEAFTTARLLAGLDDSLDLHCLRHSYITHLIEFDYPERFVQEQAGHAFASTTAIYTGVSNDYRNQLLVRSLRSRLGEEWVP

SEQ ID NO: 5584 - protein, 102 aa, synthetic construct
  REGION 1..102: note = TnsF-Tn7 System Protein
MGYEWHLRRRMAEHELFHTSDLVPLLAERGISLSREQVFRLSTQPPQRLSMDVLVALCDILECTPNDLIEPKIVNQQQRKAAGSNTVRPTVRKTTIRRPDPQ

SEQ ID NO: 5585 - protein, 336 aa, synthetic construct
  REGION 1..336: note = TnsF-Tn7 System Protein
MATGEFPVAHSTIDLLPPGPGTRYFRRLLIAAEVLPSIHVLQHELTAHVAAVAATLSPASANMVRRFYRWDLLPKLHRKYRDQGRDLSAGAFINQRGRIAVIVRFLGWMDGHGLALADLDQSSLDRYTARIKVRGPVDHFVRWATRSRLAADLAIYPTGAPNPTTTMTEEELWRATDLLLESETIELAVRVVGLLTLVYAQPLERTVGLTRDRVEVTPHRITIRFGTTPVELEESVAALVRRHLAAPPRRGYAAGESDWLFEGLSPGTHLSAAFARLRLAQHGIGARVSRETRLNLLVMRMPASVVADVIGISNLTADQRKNRAGGTWTSYPGLRP

SEQ ID NO: 5586 - protein, 336 aa, synthetic construct; identical to SEQ ID NO: 5585
  REGION 1..336: note = TnsF-Tn7 System Protein

SEQ ID NO: 5587 - protein, 346 aa, synthetic construct
  REGION 1..346: note = TnsF-Tn7 System Protein
MGYHTRISKPEVSMTHANAPLTPEGRRRLALLITRDGWSLRRAAERFQCSPATAKRWVDRCRAGLPLTDRSSKPLTSPNQLPRTTERRIVALRFTRRWGPHRIAYHLQLHRSTVGRVLTRYGMPKLTNIDQATGLPVRKPKPKRYEVASPGQLVHVDIKKQGRIPDGGGWRVHGRGSVQDRAAGVARGRAARAGATSSRGYRYLHHAVDDHSRVAYSEILDDERKETAAGFWTRANAFFASIGVTVTAVMTDNGACYRSHAFADALGDTVKHKWTKPYRPQTNGKVERFNRTLSAEWAYAKPYADEAERTAAYETWLHHYNHHRPHTGIDGQIPSARVHNLTGKYN

SEQ ID NO: 5588 - protein, 380 aa, synthetic construct
  REGION 1..380: note = TnsF-Tn7 System Protein
MQLLQHEVVRSGSDGGGGAPLRLAGNVVVLDEEKFVFDSMLDGWSDQQASRGLKTITVERRLRFIQRFTEFCEAYPWRWQPHDLEDYTSRMRSGATPLSSSTLRNYQLCVRLFCDFLTNPRYGWQTECVTRFGTAPQQICHDWNTFTHLLDYEGSPGRRALTFDELEGFFDAADARVESIVRAGKKGALSALRDAQMFKTIYAFGLRRSECVWLDVADMRSNPAVSQFGRYGALYVRHGKGTRGTGPKRRTVLTLPEFEWVVDGLAQWVDLGRPRMIGDWKTNVLWPTERRTRVSPRYLNDRFAELRDEVGLPVELTPHALRHTYVTNLIEWGYSEKFVQDQVGHAYASTTAIYTSVGDDFKNRVLVDALRRTTEDRDDR

SEQ ID NO: 5589 - protein, 116 aa, synthetic construct
  REGION 1..116: note = TnsF-Tn7 System Protein
MTADSTGPIDWHLRALMADAHMFQTTELIAPLREQGVELSREQVYRLVTRAPERLNVEVLAALCRIFGCQPNDLITVTAQPAASRKTGTDHGQHDSTIGELRPIRARLRRPDASGR

SEQ ID NO: 5590 - protein, 256 aa, synthetic construct
  REGION 1..256: note = TnsF-Tn7 System Protein
MIKNVPTGALPKKAGKAAGFFLAIDGDAQVRQPLIAADLLRIFDTKALRANLNATDFVCEHYGLSIDKDARNEARDLALIEARLSAADSKPWGPLLREYRVWLTGKQTRTVSQYLGVAEAFCESAQLEGPFSQEQLLAYLAKVPGARATISVWVTFVQKCYGWQVTMPPRTAKAPNLKRGAVKLLDLLARAGSPPESTDQDLADILCLVYQFEPAELRRTAIAVTPEGDILTKDGLVQVQAEMRDIVLEWSKRQTW

SEQ ID NO: 5591 - protein, 219 aa, synthetic construct
  REGION 1..219: note = TnsF-Tn7 System Protein
MKRLVSIAPVRKLKNSRRALTGKVNLEAGGVAGFESSLERDLLIVLDANPKVLRVQEQPFTLTHVHAGRVRRYTPDVLAEFDRDEIPTVVYEVKPLEVLKEDWQELRPRFKAAVAYCRRRDWQFKIVTERHIRTPYLHNAKFLRRYRAMDTLYVRQAQLRYTASALGPTTPEALLAAAYWPEEERALAIPALWQMVARGDFDIDLNKPLSMRMPMQLRE

SEQ ID NO: 5592 - protein, 338 aa, synthetic construct
  REGION 1..338: note = TnsF-Tn7 System Protein
MHTNWSPPIPGELLTSYLARQAISHGVSPHTLVQLASPGTAVWNRDVDVSASSGLIDDLAVASGQPREVLEELTLGRWEEVTRRQPEPLQGTYHWIGSIGVYHRRRLRSGLAFCPACLAEGGGFLRQWRLSFWTVCPIHQTLVLDRCPRCGAPAQPQRQGFDISVCWNCFTNLASARAVPAEVTVTQSLLFNALVGPRDWFLPCNFRCSGKDLLWGVDALLSGFGTAGRPAYSSRARVEFRPVEVRHADMQLTESLIGDAVALEVSADRCHLTQRSFRQSMPPWLAAVVARLPPGRRNRGCSVNRREIRMVGEAERRRQVGWREKRAALLFKMIGKAQ

SEQ ID NO: 5593 - protein, 631 aa, synthetic construct
  REGION 1..631: note = TnsF-Tn7 System Protein
MSESNFLSIAPGAEVMVGQRRYRITRSLDLYSVLAEDVETQAPTRLRIETMSRVIEAATDDGTPNYSVHHYSDEVWAVAQRRFEAIKPLIEMPYRSKDDVSRAALAAGVNTATLYKWLSLYLDHQHVAALVPRKPGRNKGDRYLHADQELVIASVIEDFYLTKQRRSPREVVAEVLQRCRVASINAPHENTIRKRLAEVRPATALRSRGQKDKARNKYEPIRGSFPGADFPMAVVQIDHTPLDVIVVDEVYRKPLGRPFLTLAIDVFSRSVVGLYVTLDAPSATSVAMCVSHAINAKSEYLRELGVEGDWPVWGQIGTLHADNAREFKCKAVDRGCQANHIDMQWRPVKKPNYGGHIERYMGTVATEMKKVPGTTFSNVQEKDTYDSEKEAALTLRDVERYLVEFIVNNYHQRTHSQLQGSSPMRIWQQGILGGDKPGIGRMLPSNPDRIRLDFLPYFSSTVQRYGVRVDYVYYYDPVLDPYIGATDPDFPKRHQKFTFARDPRNVSVIYFLDPAVGDYIAIPYRNLGHPAVSVGELREAQRAIRAEGKAAVDEDRIFDSIRRNRQLVDESVSKTKAARRQHAKRPKQNSGVPSTTQAPTAPPAPKTPVAAAKDRSIFSQVLEVLEVGEIN

SEQ ID NO: 5594 - protein, 225 aa, synthetic construct
  REGION 1..225: note = TnsF-Tn7 System Protein
MVGMTGGNPPCPGEISLAHHGVLFLDELPEWNRSALETLREPLESGHIRIARAARSVQYPARFQLVAAMNPCPCGWAGDRSNRCLCSDERINRYRARVSGPLLDRIDLHISVARMDAVELRESTPLGEPSAAVRARVEAAHARQQARGGLNAHLPPAALRACTKLSEADQDLLEQAIERLQLSARAMHRILRVARTIADLAGCEVIQTAHLAEAIGYRQLDRGKP

SEQ ID NO: 5595 - protein, 293 aa, synthetic construct
  REGION 1..293: note = TnsF-Tn7 System Protein
MNAFPHLMDSIAVHMDSSVEKRIEICRADRWIGYEKAKSILDSLDQLVMYPTTQRPPCRVIVARADNGKTALLRQFQLRHKSVEKENGTLCSPVVRMAMPVPADLSQVWSEILTRCAVTHRRSDPAHTKYQMVLAVMRLRMVRVLAIDEFNDVALARKGAADILAGLRKLSNDLNISIVAAGTTAAVNALSFDAQMKSRFQTVAMPRWELDIPYLNFLNTYECLLPLARRSGLATEELSTALFALGEETIGGTVRLLKEAAILAITNGSEQITVNLIQAVKEARPQEDALADV

SEQ ID NO: 5596 - protein, 293 aa, synthetic construct; identical to SEQ ID NO: 5595
  REGION 1..293: note = TnsF-Tn7 System Protein

SEQ ID NO: 5597 - protein, 408 aa, synthetic construct
  REGION 1..408: note = TnsF-Tn7 System Protein
MPELTCPRCRHQGQQHRWWAHRHDGVICPRCHLTERITEVLDDGTGRVAPALLPLHEAIRTQPRPDAGLVWLVGNRHVSPLLADLATGRLPLSHESLNDHPSPQSAAHLRDLLVQHKILEQRDRYLVQFEAWLSRTLASIEPTEDRELISRFATGHSLRLRERATREPLTPGLVDRPQHEINSAKAFLAWLRDHDVTPATCTQAHIDTWIATGSTSRQGTRAFITWGAGDGAFPRGLSVPYNVQVTRRRKPARGTFDHEQRLRLLRDILDPSTDYILRDRAAFIILILFAQPLAQITALTIDDLALNNHEVRISIDGPHEPRLVPDPFAPVLRDHAHSRGPRNIEANRSSPWLFPGNRPGQHIHAKHLKNHLSRYGIEVTRTHLAVLRTLAQEMPPAATALSLASGSL

SEQ ID NO: 5598 - protein, 408 aa, synthetic construct; identical to SEQ ID NO: 5597
  REGION 1..408: note = TnsF-Tn7 System Protein

SEQ ID NO: 5599 - protein, 313 aa, synthetic construct
  REGION 1..313: note = TnsF-Tn7 System Protein
METLNAIRARGITKTFDDVVALDDVDLDVTSGQIHGLVGPNGAGKTTLLGLLLGLAVADSGQLEILGTPIGRALAAPDGVAGFVDGPGLYPSLTARQNLTALAALRGHDERTAGIDDALDQVGLTAVADDKTRGFSLGMRQRLGLAAALLTRPRLLVLDEPSNGLDPAGKRHVHRVLTRLASEGVSVVLSSHRMDDLEELCSEVTILATGQVVFSGPLSKLAAENRELDYRLITSDARAARRVADETAGILIVDDAQSRYDAEALVVRALVPAMDELVAQLVKAGVALRELAPVVSPLEAAFLALTEQQEDPR

SEQ ID NO: 5600 - protein, 313 aa, synthetic construct; identical to SEQ ID NO: 5599
  REGION 1..313: note = TnsF-Tn7 System Protein

SEQ ID NO: 5601 - protein, 280 aa, synthetic construct
  REGION 1..280: note = TnsF-Tn7 System Protein
MALVDGFAEWLIARDSASPKLPKTFISHLPFFQVLDQSIESAERLVPQTMMDEFTVQGLRRHLLPLQFLRHEVGLEITEEMKTDHVETARTIAILERAETGGWGNDLIRFNQWLIQEQKPVRTRRLYVSAADRLMRFTGIKVLTQLDQEMVDRYLTDTPCARNDVGAVLRFAKTVLNLSIGLPVRKFPRPQTPKPLAEVRTLLKKIRGGTEPVQVQHLRRLVSILMRIPLRAIIKGDWWPEQRGRRWLVVSKREVVACPPELEDVVARWLTAREDYVRPQ

SEQ ID NO: 5602 - protein, 182 aa, synthetic construct
  REGION 1..182: note = TnsF-Tn7 System Protein
MEQDLLELLDFDARVSEVLVQPFTIFHVENGRRRPYTPDVRATYIGVGGEVVVYEVKYQEDLRKNWAKYRARFGAAYRYCRDNGWRFKLMTERHIRTPYLANVKFLRRFLRLPEQELISGQLLYTLRALGPTTAQALLAATYMSADSRLRAIPTLWKLVGDGRIAAELGEPMTMASVIWMES

SEQ ID NO: 5603 - protein, 646 aa, synthetic construct
  REGION 1..646: note = TnsF-Tn7 System Protein
MIGASRKFFAIAPGVEVSSEGRRYVVTHVMTPSNVLAKDLGTGQSQTLRVETLTRVVESDSGEEKADRDLALYSDEEWAEGQRRLSFIKPLVEMPVRERADVEAMAKLAGVHYTTLYKWLKAFLLTGHVSSLVPGKAGRKTGTRMLSMEQEAVIQSAIEDKYLSGDRGTAQDVVDEVRHRCHRMKMKMPSHITIRARIKDIPKAMALRKRGLRDDARDRYEPIRGSFPGADHPYSVVQIDHTPANVIVVDEVSRLPIGRPYLTLAIDVKTRLVAGLYLSMDPPSSVAVGICLSQAICQKREYLANLGVGGEWPVWGVMGKVHSDNAKEFRSKALSRACEDHGIDLQYRKKKAPHYGGHIERLMGTAARIFLGLPGKTFSNPKERKGYDSEAKAAMTLKELEAYLVDYIVNKYHKSIHSGIGMTPLAAWERGIAGSDTEPGIGLLPLPEDPARVQLDFMPYEERTIQRYGYQWDNVHYYDSVLDPYINSVDPNSKKKTKYLIRRDPRDISVTYFLDPADNRYTAVRYRNLAHPAISLWELNAAAVRMREEGLRGVDEDQLFATVGRLRQRVDDALQATKSAKAARRSAARRPPGERPIATKQPSRAVHIPAAANDGNIHGQLVGPEQPFGDDPFADPITPFNVALKR

SEQ ID NO: 5604 - protein, 294 aa, synthetic construct
  REGION 1..294: note = TnsF-Tn7 System Protein
MSVEHLLPEVAAILEEPNQSRIEFCRQDRWVGYTAATKALDELDDLRNFPKNLRPNNILLVARSGNGKSSILDYFANRHPIGITNEGKPVVPVLKLEMPSKPDESEFWSLILWILGISHRESDRTAHKKRQAKSAMVYANVQMLALDEFNNVAEAGRATADLLAAIRNLSNELRIPIVAAGTEKAINALNLDPQLKSRFEPIGLPQWKLDREYRGFLAAYEQLLPLAKPSGLASRELATTLFAMAGGTVGQNVKLLRRASVEAIESGMEQITPELLRGLEWTRADGWDVVARSV

SEQ ID NO: 5605 - protein, 294 aa, synthetic construct; identical to SEQ ID NO: 5604
  REGION 1..294: note = TnsF-Tn7 System Protein

SEQ ID NO: 5606 - protein, 526 aa, synthetic construct
  REGION 1..526: note = TnsF-Tn7 System Protein
MPIERIVIDNFKSFRHLNLQLNAHMNLVVGDNEVGKSTLLEAIHAVITGQLYGRNLTYELTPYLFHQPTVKEYLAALRAGTPASPPRISIEAYLGNDPALASLRGTNNSLGLDSAGVRLLVELSDDYREEFNAYLQQHQGATSLPVEYYTVRWYSFANNGVTARTIPFDSTIIDTHGIKTLSGADRYIASIIEQALTPAQRVSLSLSFRRMRQSFSEEDDVAAINAYLTQHTGDISHKALTVGVDSSPRSTWETSLSPYLDELPFTQAGKGEQSAVKMKLAMHAAGSAHVLLIEEPENHLSFSGMSQLIDKISALSTTQQVVIATHSSFVLNKLGVDNVILFSAQGQMKLDQLPHDTHDYFMKLPGHDTLRLILAKQAILVEGPSDELIVQRAYFDHHGVAPLARGVDIISVKSLAFKRFLQIAERLRIQARVVTDNDGDIALVQERYADFPNAIYYDSDESAPSLEEQLIKANSLDELNTVLVKSFADEVALLKYMKGHKTDTALAIFNSPHSITFPDYVQRAIA

SEQ ID NO: 5607 - protein, 526 aa, synthetic construct; identical to SEQ ID NO: 5606
  REGION 1..526: note = TnsF-Tn7 System Protein

SEQ ID NO: 5608 - protein, 209 aa, synthetic construct
  REGION 1..209: note = TnsF-Tn7 System Protein
MIAIYGWSTRRCRLCCDLSVPARASGDPVNFHSEEDQVKLLIRCVQDTELPMDVRAAGALVLLYGVPVSRISQLTVDHLNKRSDGTYLTLGEHPVLLPPAVAKLIIEQASRIPRSVVSRSDAGMHWLFPGNLAGKAIGATPLAQSLTNHGIGVRAAKNTAVLSLASDLPAPVLSQILGVHINTAVHWVKYVKRDWASYVESRRHTARRE

SEQ ID NO: 5609 - protein, 721 aa, synthetic construct
  REGION 1..721: note = TnsF-Tn7 System Protein
MEHTSNADLRADADAVLARLVGDATGAARLREDQWRAIEALVADRRRALVVQRTGWGKSAVYFVATSLLRARGSGPTVIVSPLLALMRNQVEAAARAGIHARTINSSNTEEWETVQAEIASGEVDVLLVSPERLNNPDFRDQVLPELAAATGLLVVDEAHCISDWGHDFRPDYRRLRTMLTDLPPGVPVLATTATANARVTADVAEQLGTGGSSDALVLRGPLDRESLSLSVLRLPDAAHRMAWLADHLDELPGSGIIYTLTVAAAEEVTAFLRQRGHVVASYTGRTENADRQQAEEDLLANKVKALVATSALGMGFDKPDLGFVVHLGSPSSPIAYYQQVGRAGRGVEHAEVLLLPGKEDEAIWEYFASLAFPSEELVRRTLDVLARAERPLSLPALEPLVELRRSRLEIMLKVLDVDGAVKRVKGGWTATGRPWTYETERYEWVARQRRAEQEAMRGYASTTDCRMEFLQRQLDDEDAKPCGRCDNCAGARYAAETSTAALDAARVDLGRAGVEVEPRRMWPTGLPSIGMDLKGRIPAGEQAQPGRALGRLSDIGWGNRLRPLLAAQAPDGPVPDDVATAVVGVLADWAKGPGGWASGASDAVARPVGVVTVASRTRPRLIRSLGARIAEVGRLPLLGAVEYAADAAPVSRSNSAQRLKALHGLLEVPPALASALAEARGPVLLVDDFTETGWTLAVAARMLRRSGAQGVLPLVLAVQG

SEQ ID NO: 5610 - protein, 478 aa, synthetic construct
  REGION 1..478: note = TnsF-Tn7 System Protein
MQLCYEQICSSCEKVVDKFKKKYKGHKYCSTCYARIFKKRLCSCCGTYARLPKNDDQAICNECIKKRPCIRCNQLNKPIGKLTEYGMVCNSCSVYFRPIVRCERCDAPSQKLTRISRFNDGLRVCPKCSIRDYETCPSCHKYRLLVVDDKGAKICRKCLDQTSKECKKCSVMLPAGYADLCDSCYWHKNLWEKANRNLKSFQYKHLQLGYEHYINWLETRVGAHKAAVYVNKHTHFFIKTEELWFDGIPTAEHLLKVLRTSGLRKFELVMCWLDEVYDIRVTAAEKDLCSHQDQIEKLAASLPQASNAYDIVFAYKNEMYEKMKNGKTSIRSVKLAIKPAVALMHYVCMSGDTLPCLKHVKAYLIDFPGQAAALTGFINFLNTYFSTSIDYLAFKNSRFFNEKRKQKVESEIVKLASKPLNNRDDILSWVKSGVRYFHNVPYVDALKIKYEMITEVEDGYNLLFNQQYYWLPRNNRLT

SEQ ID NO: 5611 - protein, 478 aa, synthetic construct; identical to SEQ ID NO: 5610
  REGION 1..478: note = TnsF-Tn7 System Protein

SEQ ID NO: 5612 - protein, 236 aa, synthetic construct
  REGION 1..236: note = TnsF-Tn7 System Protein
MKKLSDEYVPVRKAQTVYGSISGNYAFRGEKTIWFESTLERDFILKQEFNNNVIDVIGQPVVIPYITELGNQSTYTPDFLVQFLSSNCDDFEDFPVPMLIEIKPKKKLVEDWDKLKPKFRAAHRFAADKGWKFKIISETRLYDQYWENINFLRKFRRSHVDAVDQQLLLDTLQKLGQSTINQLPAHIFKDKTNVLKGIHQVWALVAKRMIACDLYCPLTAETVIWVSQNDAFVRSI

SEQ ID NO: 5613 - protein, 596 aa, synthetic construct
  REGION 1..596: note = TnsF-Tn7 System Protein
MPTTNNEKVITIDCFPNDNIRRVTYRYGGLYRNGGSDTTNPLVEVLLIEIGENDQWLDLKKCSTFLVPLLDLDAVQQGSIWKGNLLTNEVYNFIGKLTTKQFKFDFTNHKPRNIKSIDKLPNTSEYYVPLKKIMLPQKNDYFIQGYPFNKYNPESYHKVNYCLMLSNDNIQVITSAVHILHSLFVNRKDIRGSLLSTPIQTIVNRYLDSYTTETIDDKTEYKIKIRKPYEDLGDTAIIFLANLALNKHVQNTVEKIQYSMEITDFSSLQNNNNARYPIVLPPHPTTLSVETEGIWLDEEKTRFFITRFKRVDPINDHLIDVNQDHINTVKKDDDQKPIPRERSKNKNEHINTQKPPSRVNGEYRKRSDVETGSTVGILKYSLNESENDPVKVDTNIQPYTDKSEAVETSSDQPYGNEKTNIKKSESADKPPVRDERFDIKYIIQSLENLVSKADSNLHYVYSVNESGQSISGFNLLQIKPLVPDPKHPSWIDSEIGRKLLFLKLELKDRNDHCYLIDIHKNRNHEAFCAFLILTTSKLTSEQIKKICIAIENTKGIKKWSQQCTSFTRQIIPIKHSCATPEEWANKFASLFSKLPK

SEQ ID NO: 5614 - protein, 636 aa, synthetic construct
  REGION 1..636: note = TnsF-Tn7 System Protein
MIESNAVSIDRSRISLKPNVVVGYEGKPYKIVNVLNANDIVISSLDSVRSLQVNAKSLTVFDGKNMLTENLNKGDQDISNEAWQIALQRYEIIKPLIEYSTTELVENRANEYDVNRSTLWKWLKDYRENNSLMALIPKKRGWTTEKSRLSPQVSNIIKQAINDEYLNAKKPSISKTIEIVKAECFRLQLEAPHENSIRRRIEVLNNYQVTKARLGSKAAIDKFKAAAGSFPNADYPLAYVQIDHTPLDIEIVDDEFREAIGKPHLTFAIDVFSRMIVGYYLSLEAPSTTSVAMCIASCILSKKRKLIELDIDAEWQVEGIMDSVHTDNGPDFRTNHISKACLKYGIHWEYRPIGGARFGGHIERMLGIVNLEMHVLDGTTFSNVQQRGTYDSAKQACMTLKELEYYIVYWVTKVYHQKKHSALGTTPIVKWEEGVWGTKTTAGTGLKERVSDEDSLFIDFLPEFEATIQRTGVQKDNLFYFADCLRQWVNSIDPEDNNRKRKRKFLFKRDPRDISQIWFYEPFSNTYFKVPTAKREIPPISLFEYKQVQNYLKSERQDVQNQDEIYKAILHLREQLAQARSLTRKQRRSNQRKKENEKAITQLSEHNQPKKAVISENLQTSDDLWSTPLTAFDDLR

SEQ ID NO: 5615 - protein, 307 aa, synthetic construct
  REGION 1..307: note = TnsF-Tn7 System Protein
MEKYEHLADHVLEIMSLSDNDRIEILFSDRWIGYKKAVTILNTLTDLLNRPRKLRPECLLIVGDSNMGKTTIVHEFTKQHYTQVVNDIDMDLLSVNKPVLSILAPAKANVKELYINILNHFFVPFRPTDSEAKLRNQAVHLLRKYETKMLIIDEIHNCLTGSAKLLPEVMNTLKNLSNELSLNIVGVGTREAITILHTDPQYASRFDVANLPKWELNEEFLRLLLSYVRLLPLKKQSNLASKELAPLIFEISGGNFGDLNRLLIECAKEAILQGSEEITHEIIHKFKWLKPTEGMRNSIRNINLNMA

SEQ ID NO: 5616 - protein, 307 aa, synthetic construct; identical to SEQ ID NO: 5615
  REGION 1..307: note = TnsF-Tn7 System Protein

SEQ ID NO: 5617 - protein, 375 aa, synthetic construct
  REGION 1..375: note = TnsF-Tn7 System Protein
MYRVEPRWYIRTRIQEGEILSSWLIRSALDMGCSPLTLVNILWGKWRALTIDVDRGLNSAKMAELLIHCFELQSSIEQTMLSSYFPVLASSDHNKGQPIPWLLVLGNRNRSNISGHQVCTQCLNGLSAPPYLRLQWRMGWHSGCWLHRTTLIDHCPQCGTSIQPKKIDIEHGSLAICSSCYIDLGTFIQCPAEANALCFQNLADQVFSTKCGLYNEINIPSIEWFEIARAWLSFIRSPINMKSPNLLRMFESFNIKLSLDFPVTPLAFEYLKVHEREKLLSLLNQIMLLPCELIVERSLKYGVSRSYFWDKRKKLPIQLQVMKDQMLKPSKIILSGESSVVANKPKSKESVQRKWLRLSRKLGKEGLGDLDAIML

SEQ ID NO: 5618 - protein, 477 aa, synthetic construct
  REGION 1..477: note = TnsF-Tn7 System Protein
MANDDGPRSSMCEGCGKSLFRTKKIHKQLKYCSTCYARLFKRRPCPQCAEVARLPIFDLKAVCQRCLSSQPCVRCHRVGRPVGRMTVYGPACNSCAHYFLAPQPCDICQVLSTRLVNMLADGQIVKGCPRCARRDFETCAACGRNRRLILGADGRKLCRLCSTVGITTCSFCGVNIPAGMGAKCTECYWEQTYRKRLAMDIEVFSSGWMRAEFERFGAWLPSCTHYKKAARSIHRFLLFFQEIEKHWPSWPSYADLLAYFGAEALRRMQLPMVWYTEINAVVVDVQAREMDSEQRRISAILASTEPGRKSEALNGYFRLLMGRVSIGRTSIRSARLALSTAARLLTDKCRGANELPSTAKVSRFLSDAPGRMASVTGFILYLNAEFGSGIDLGQVRRLSKILEKRRLEKELFALLRRSRAGEDFETRWLLVGLKYFHGVSRISARDLTVAPDASGKGLRVSIGYRDYWLPSPYMVTP

SEQ ID NO: 5619 - protein, 328 aa, synthetic construct
  REGION 1..328: note = TnsF-Tn7 System Protein
MASGEHLKALLRSHIKRDDSHFLAVAMQMAAHEAKQGHGKLAEDLRTLIDSAQSKRKPLSSGPVPIGQPRGELSNLLSVALPQTRFSEMILDDATHGRLARIISEQRNFEKIRAHGLSPRRKLLLVGPPGTGKTMTASALAGELGIPLYIVRLDSLITKFMGETAAKLRQVFDAIRDTRGIYFFDEFDAIGSQRGLANDVGEIRRVLNSFLQMIEQDQSNSLIIAATNHPEILDYALFRRFDDVIEYGLPNPEQICAVLKNRLVNFSKSIKNWDELTTVASGLSYAELVRAADDAIKDAIIHDRGAVDARDVAKHLEERKAFHGRQRL

SEQ ID NO: 5620 - protein, 328 aa, synthetic construct; identical to SEQ ID NO: 5619
  REGION 1..328: note = TnsF-Tn7 System Protein

SEQ ID NO: 5621 - protein, 477 aa, synthetic construct; identical to SEQ ID NO: 5618
  REGION 1..477: note = TnsF-Tn7 System Protein

SEQ ID NO: 5622 - protein, 207 aa, synthetic construct
  REGION 1..207: note = TnsF-Tn7 System Protein
MSGVFPFRKEEGIPYESMLERDFLARTAFSCDVETIVPQPIQIDFTGRDGRTFQYTPDFLVYYRLGGRNYEQYPKPTLVEVKPEADWRANWRKWLPKWKAAWRYANDQGWNFHIYDESRIRDTAFANIQFLERYKRYHYPPEDSAWILETVRQMNVVPFHYLLARHFGGIYKAEGIGHIWHLVATRQLDCDIRLPLNSFLELWIPER

SEQ ID NO: 5623 - protein, 640 aa, synthetic construct
  REGION 1..640: note = TnsF-Tn7 System Protein
MTDQDDSNQELVPFEPDRARVDANIDSMVTYADHVYRVSQVLDFTTVIGIDVESGRAAALPIAALKPVAKAKVDGLYAYYDIAAVAAEEWAIAQKRYAAIQPLIGNVVVGRKEVEQRAEEVGVGAATLYRWLGKYRDWGELLALIPRKRGWQQGNSRISAEAEEIIRSVIKGFYLSHQRPTAQEAVGRVKEACEAMNIASPSPSAIRARINLVSEKEFFRGRGFAEIARNKYTPSPGSFPGADFPLSVVQIDHTPIDVMLVDNVHRLSIGRMWLTLAICVHTRMITGYYLALDEPSGISVAMCVAHSALPKEDWLTVHGVEGEWPVWGFPVVLHSDNGPDFQAETLKRSCLLYGIENRFRPVKRPKFGGHIERLLGTFMKKVHSLPGTTFGNVDDRDGYDSEGKAALTVDEFEVWLVREILKYHQEYHSKIFMSPARKWHVGIFGNLGVDPLVGMPMRPTDPFTIQRDFLPSFERTIQHYGVEFDVRYYSEALRPWINSKDEETGKTRKFIFRRDPRDISVIWFFDPVLKQYFKIPVANQAFPAASVWEYRAAKKKAVDEGRAHINEELIKRYILENRELVASAQARTKQARRQVERHRRHSKNVTPAQPQPQPVQAPQEQPAFATGMVDFDLNSFGDVS

SEQ ID NO: 5624 - protein, 244 aa, synthetic construct
  REGION 1..244: note = TnsF-Tn7 System Protein
MAQLFPTKAAVFQGFHSTTVSSISESYSSSKPQPGEITLAHHGVLFLDELPEFDRKVLEVLREPLESGCIVIARAKERVRFPARFQLVAAMNPCPCGYLGEPSGKCSCTPDMVQRYRNKLSGPLLDRIDLHLTVAREATALNPAVKPGEDSASAAELVAEARERQQKRQGCANAFLDLPGLKRHCKLSTADETWLETACERLTLSLRSAHRLLKVARTLADLETRADISREHLAEALQYRPATQ

SEQ ID NO: 5625 - protein, 596 aa, synthetic construct
  REGION 1..596: note = TnsF-Tn7 System Protein
MSFIARRSFRSNFKPRTSFGGALEKKDYDLVIWFYGGVWKSPNASHEPLVDVVFRRLDPDGTLHSTEVIPVAMSFLGQLRIGTCWRAGRWAGEIQLEDLGVTAVNLRENVTWRFVQLRDTLLVNDEEYGLKSGEWPVWLVEVDGWNEEKILIPCVEFFIRCYGRNSESARILATYPWDMVLQRFFYDFPTEPGDQRIQLKNWVSSSEGVFLWHLLHDPTTRDACKRIYAELDAQFGPATKHSTKAYLKAGPWFEGTALLMGEGRWLADGKTFLCLQLTGFSDPKGPVIDIERSSFVTDGTHDGGWHRQKRVKELPENQRVSLTDAEPPDVDSETLRVPNYPIQQLGDRRRIRTTQRTHKGPNGNVLSSSNGHALHAPGERQGSGKGVGSVEFQTQLNWESQGDLKAMWAACGLLAEKYSDIISSVEWFTFERGYQTIGPPELELLRPLENASLSPKVRNWPYLDVREKVMRGLLIIRIRAGLRSFYIIESQRRPRYVAQARDAENASNAETEDAAGHQCLLLEISAGENDTRHALKEICSNIRYVQGQVRNIRLDAGFPKITFNHSKRAPGEFLFEGVLVSKLAELNLKLETKVVN

SEQ ID NO: 5626 - protein, 295 aa, synthetic construct
  REGION 1..295: note = TnsF-Tn7 System Protein
MTQYAHVHPEFRAVVQLSDNERLHFLDQPRWIGYPAAQKILDTLLHLMQMPVRPRMRNLLIVGDSNNGKTTIVRRFVALHGAAYVNEEVESVKPVILTDAPPTSGEKGLYIAILEQFWAPYRESDSVTKLRYQVIHLFRTCSVKLLIIDEFHSLLTGSAIKQRETMNALKFLCNTLAIPVVGVGTPDAVRVLHTDPQHASRFDVMPLRTWEPNADFQRLVKDFESVLPLREASGLSRPHLAQLLYSISGGNTGDLQRLLLECATEAIKSGKEHIDQSIIESKSWLRPTRGIRELI

SEQ ID NO: 5627 - protein, 295 aa, synthetic construct; identical to SEQ ID NO: 5626
  REGION 1..295: note = TnsF-Tn7 System Protein

SEQ ID NO: 5628 - protein, 285 aa, synthetic construct
  REGION 1..285: note = TnsF-Tn7 System Protein
MEKRIKMDCTAFSLPRMAMHFEVFGHWLMVLVGVNKAAQTIHRYLPFFMEVERNWKDFPEFAVLLAHFGTAKLRHVFLPMRWMEVTGVVVPDMAAKADDSDRRRIAVTLDKFAKGMKARALLEGYYKTLMKNMNAGKMTLHSIRLALSPAAALLCKASEMDRIPPNQRVLDIYLAKRPGQRAAISGFVRYLREVHGAKIALPKANRGRALRQRRKKLEIELLQLMRAGCYSSELKKQWLSVSLAYFHGLNRRVGFQVWNKCLSESDDGLVVVWNNESYWLPMYPK

SEQ ID NO: 5629 - protein, 600 aa, synthetic construct
  REGION 1..600: note = TnsF-Tn7 System Protein
MATKNPYPLKRYSQVIKLLGELFEDDKPKVAWWYHGIHTNPLKGSQPHVKIIFRELTNGMLSDYYSQKEVPITWLGQIKIGSVWEKNVSHYAMIFEQAEFIVDFSFGNYRNNSFFYAKSHNITPPFPPELYKLGYQPDSNWMIEFDLPSKGKLVIPCLEFFSRCYGRSSEIKRVLTTYAWDVPGDGVIDRFYATINEPEVNGVWKVKLKRRFVNSDVVFLAHLKYDKYAEKQAKLIFSTISTASSNKKDPSKRGPIFLKINPWFQEKTKLIVRGIPFDDGKSFLALHVVGCGEPGGLDIERSRENPNNPLTKGENLTPKAWAGTPRKHLITPPSIIDLTGDIDPQHAVSAIELHDEDFILTGKPRYVIDIRNKESKSTAGSKGEGLDATNYSAGEPVGSNGSTGYASIHAVQTLETHGILRDMWNAMKFLKQKYPQRIKSVSWYCADQTFSDHDEFALIPAKEFSISDDIETSIRNWVYINSLKTQVRGFLVIRIVIDSMSIFIVEIQRKLRRTKDKHGNIYQAEEPFQGLVFKLKNESELHEWLGDLFSNIRYAEGVFKKISGTCPGIADTFSHAESKNEEVTCENTVLLALRKLRINL

SEQ ID NO: 5630 - protein, 285 aa, synthetic construct; identical to SEQ ID NO: 5628
  REGION 1..285: note = TnsF-Tn7 System Protein

SEQ ID NO: 5631 - protein, 219 aa, synthetic construct
  REGION 1..219: note = TnsF-Tn7 System Protein
MRKIKPTRRSVSGLYMFNGHSSIAYESTLERDFLIRTEFSLSVLDVIPQPAQIPFVSANGRTYTYTPDFLIYYRLGSCSSYDDYPKPVLVEVKPEKEWRKHWREWLPKWKAAWRYARSQGWEFHIRDESRIRDQTFDNIRFLERYKRMSFSVEESRWVIETVRHMGCATIDYLLARHFMGIYRAEGVAHLWHLLATRQLDCDISRPLNEFSELWISTHE

SEQ ID NO: 5632 - protein, 642 aa, synthetic construct
  REGION 1..642: note = TnsF-Tn7 System Protein
MNKNDEFDMPNIAFEPNRKRVKIDVGQFVQQDNTVYQIAQVLDFESVIGVAVETGRSVPLRIGDLRSVADTKDAKLQIAQDLAEISDEGWQIAQQRFAAISPFVGKFQIGRDEAERRAKELGIDPSTLYRWLQRYNAYGTVTALIPKKRGWQEGKSRISPDCDEIIEKTIRDYYLTLQRPTAKKTITEVLRLCAERGIKAPNHMTIRARIAKVSEKERLRGRGFKEKAQNKFLPVPGSFPNADYPLAVVQIDHTPADIILVDDLYRKPIGRPWITLAMDVHSRMVTGYYLSFDPPSETSVAMCVAHSMLPKDDWLLLHKVDTSWPIWGVPRTIHVDNGADFRSNNFQQSCLAYGINLEFRPVKQPRYGGHIERMLGTLLREIHDLPGTTFSSIKAREGYDADKHAAMTKSEFETWLVTLICKVYHQRLHASIGMTPLKKWEIGVFGNNDFQGVGVPPRPGDRLTILLDFLPAFRRTVQTFGVTIDGMTYYAEVLRPWINIEDSETKKKLALVFRRDPRDISSIWFFDPDLQQYFKIPFANQALPAMSIWEYQQAKEKLKREGVASVNEPGILRAITELRTYVEEAQERTKKARRQAQRRKEHEKNISPAAPLPVKSTQVDESSRPAFIGLIDGDIDTFGDIA

SEQ ID NO: 5633 - protein, 296 aa, synthetic construct
  REGION 1..296: note = TnsF-Tn7 System Protein
MSPLKHIHSDFHHIMLLSDKERIEFLDEPRWIGYKTAQQVMDTLQGLLHKPVRPRMPNLLLVGDSNNGKTTIVRRFFELCGQGYVNEDADPVKPIILAEAPPSADEKGLYISILERFFTPYRATDPVSKLRYQVIHLFRACHVRMLIIDEFHSLLTGSAVKQREVMNAIKLLCNELAIPIVGVGTREAVRVLHTDPQHASRFDVMSLPVWELNPDFQRLLADFEKVLPLKNPSRLHQPELATALHAISQGNIGNLHCLLVECAKEAVKSGKEHIDKNIIECKAWVRPTRGIRELMA

SEQ ID NO: 5634 - protein, 296 aa, synthetic construct; identical to SEQ ID NO: 5633
  REGION 1..296: note = TnsF-Tn7 System Protein

SEQ ID NO: 5635 - protein, 606 aa, synthetic construct
  REGION 1..606: note = TnsF-Tn7 System Protein
MSEACTSCNKQIPRAHRRDLEGGYCLACYHLLFKHRPCQRCGEMARAREDDPTPLCNGCRDIVLRERRSCDRCGDLIGPRGILRRDGSACCRRCRRYMWPDRTCAYCGFTGKRVTRNYALGFDQPACSSCQTKRSAHVTCAGCRRPRTPAGERDGRVYCAHCLPTGAPALIHCQGCGRWRPGYSKTHCEDCGWERLHEVLLTRLKPQLTRGWTRELFAQYHRHARLASKRGQWYKALKRDIGFFVAIELAFGDREEVTSVLIVRRLGHEFVHKHQRAMSFMAHQGVIGLDNEPDYRLELAISRLQHLLEDDSPWIHQVLQRFMQRMVTTRARITNRSKHGRIPIQPKSIESALRAAHQLLAFAKVEYRASSIQEVNQEVLDRFLGINPLRGARVRAFVRHINQRERSFHKLSVPSVRRPFPYHSVLPTERRLELAQAFAKVSPSQADMRMGLISLFILVYAQTAVRASRIRLDAIRETPTGYEIKFAKLWMEVDPLLTKPLMSWLTRRREFSAFDETDTSPFLFPGRIATTATDSKSIAKWLRRYQVGTNQLRITAIAAMVTGGVRQPRVLVDCFGISSDTAILFCQALGSFDMARAAHVMNTYGA

SEQ ID NO: 5636 - protein, 373 aa, synthetic construct
  REGION 1..373: note = TnsF-Tn7 System Protein
MSRLPGLDLLRAIAVIWVMLFHSFLVGGLGADFAWLSRFGWMGVDIFFVLSGFLIGSQVLTPLARGERLSFADFYSRRAYRIVPAFAVVLAIYVAFPALHESDGIAPWWQFATFTMNLLVHYDTQASFSHAWSLCVEEHFYLVFPALAWWMTRRPSAAKFVAVCMLVLLGGIALRTGVWLHDAAMDPDRNWFVEDIYYPTGNRLDGLLAGVVLATISVFRPALWARMGERGNAFALIGLAMMALAFWLFQKRSGLLGNSIGWPVLSTAIACLVVAAASARSWIGRWRVPGAAWIAAISYSLYLSHKLVFHAVDVQFGEWLQGRGLVAFAVYALATLAGGALLHYAVERPFLQLRARRQSARRNVRGAGEAITA

SEQ ID NO: 5637 - protein, 408 aa, synthetic construct
  REGION 1..408: note = TnsF-Tn7 System Protein
MTARVIQFPRRLDPVELTDPALGLAVTPPSGPPTPPGDPAEASAPLKPSALARPPRVLTAEEQALQTRMFQAYFEGRRPAKGHAADSIKGTRRRALEFAQFVGQPLWEITEADFESWSAHLGLERNLTPSSQRTMQGAVATFFNYLVENAALQNEALRLFGKQVSRIATSDNRVVHSTDANGVRARRYLTDDETTLAFAAYDAVIEAAAEIAPGKLRYFQRDKAMFYVYYGFGLRLQEGQQLNLLSFSPNPDLPELGIYGAATVVGKGSRGSGPRTRTVPTIHPDLPLVLTWYVEHVRPQFETKSEDARKALWLSDRGRRLSRASISARFKHFLTSVGLDPTLFSPHGLRHMAVSHEAAANVPLAFTQAKVGHAHASTTQRYTHLPDDFMRTIAKNIVRQSLQQQDDE

SEQ ID NO: 5638 - protein, 606 aa, synthetic construct; identical to SEQ ID NO: 5635
  REGION 1..606: note = TnsF-Tn7 System Protein

SEQ ID NO: 5639 - protein, 674 aa, synthetic construct
  REGION 1..674: note = TnsF-Tn7 System Protein
MTKRIDRSLLAQQVAPLLMLLAELEPALETDTVITALREAAALPDGQRRIAQEVSDRPELLTGQGASAARPGVLRFIHALVRAGAATVVEPSCARCGRQRKLGRSFNGLRLCANCTRRAVAMPCGRCGKVRPPARRNDNGQAICQPCWWRDPRSWKTCAGCGDQRRVAVITEAGPICTRCRPRPEVLCGVCGRTGKGGISRATGQPMCDRCRERWAQCSRCGASASLKGGTLDEPLCARCVNPDPAFWQRCGTCGITWQLTPAECARCSLDRKLREIFTAADGASSSQLDQLREVLVQVDRPDHAMDWLNKTDVRTTLHAVASSRHTITHEALDAMPPSGTLAHLRSMLVAADALPSRDELLAALERWIDQAVAERKLSEHQRVLHGYAVWHHLRRLRGRLDGQPASHQQVKNIRRHVADAVAFLDWLDTRGLTLASCTQTELDQWLAGSPRQASRSANFVRWAITHRHASRLTAPATRWTGPSGPLDQDRRWADARRLLHDNTCPVADRVAGLLILLYAQKLSAISTLTTQQVRNEEGRTLLVLGSRPIVLPAPLDSLVNELANTRRTPGSGLIDVPSTWLFPGRWPGRPLTEEALARRLRALGLSPRQSRNTALFTLATEVPAAILAKTLGIHIKAATQWQKISNGDWTAYAADISKRTTTPDTKHSNSSNS

SEQ ID NO: 5640 - protein, 674 aa, synthetic construct; identical to SEQ ID NO: 5639
  REGION 1..674: note = TnsF-Tn7 System Protein

SEQ ID NO: 5641 - protein, 347 aa, synthetic construct
  REGION 1..347: note = TnsF-Tn7 System Protein
MAEAMLRGWRAQQSARGLREETIAERERLVRQFAEFTNEYPWRWAPSHVDEWSQSLTGERHLAPSTIRAYQGIVRLFNEFLCDGRYGWVVACEEEFGLGEHPVAIVHEWNSIVHLQSYEGDPEARPFTRDELQRFLDYADDQVDRAVRARRKGALSAYRDATLFKVMYGWALRRTETSKLDLADWGRNPAVPEFGRHGTLHVRYGKAKRGQPPRRRNVLSVFGWAVDAVADYMENVRPKFGFAEHPALWVTERGGRVKPPEINARFVSYRDALGLPKVLTPHSLRHSWVTHNTEDGVDRRFIQVQVGHECDSSTAIYTHVSDDFMNTALRKALAPALESAPPNRKDS

SEQ ID NO: 5642 - protein, 111 aa, synthetic construct
  REGION 1..111: note = TnsF-Tn7 System Protein
MMPQKLDYHWHLRRIMADRGMFQTTDLIRPLAERDITLSSSQVYRLATERPERLSLKILMALLDILDCSMDDLIEPVAVAGSGKRPKKAAGGASTGESLGGLRPKRAKITR

SEQ ID NO: 5643 - protein, 754 aa, synthetic construct
  REGION 1..754: note = TnsF-Tn7 System Protein
MTRQSRTTGGLDRIRQHLHAALPGLDGLVLEEVLGEAGLRGAAVGILERHLAAHPDALTRPGTAEPFAMVRLAHALIDRGIPGVTAPACADCGKPSRQLGRQIEGRSLCPYCFSRAHYATCSRCVRPARRTTEQEDGPVCRSCTRAASMPRCATCGREVRKTGVVDGPPLCHHCRPRTARACVSCGTEAPVQAVTPDGPVCRRCYRSPTRTCGQCGQVRHIIKRARGGEPDLCSLCYRVPDRTCSGCGRTRPVAALLLGKPRCPTCHESRPRSCAVCGRSRKVQAEWPVGPVCGTCYTQVRRNPAPCGDCGQVRPLIGRRADGAACCGPCAGAGQAYECQGCGVSGLLFRRGFCARCVLDQRVTGLLAPPGAPTVPARLEPLRAALLAAGRPVTVHHWLDLDGVADLFNSLATRRSAITHRDLDALPDKLITAYVRDLLSTADVLPQRHEEVERLPRWADHVLAQAPAEHRKIVSPFAHCYVIRRHRDRTRRGQGFAASSLARTRSLIQRPLELLAWLDEEGLALADLNQHSLDRWLSQGKRHRRDIRVFLQWARRHKLTAHDFDVPRRRVEQPSVFLKDEERLQQLRRCVEDETLPLATRVVGSLVLLLGLQISRILRFTTGDVVREGKAVRLHLNGHQVDLPPRISALVGQRLELAEAAWQNNRSASTTPWLFPCSNPARPLSLQSMHIQLRKANLTGLAGRNTARLALATDVPASILAEVTGTSVHNAMRWATLAKRDWTDYIATRREPNA

SEQ ID NO: 5644 - protein, 754 aa, synthetic construct; identical to SEQ ID NO: 5643
  REGION 1..754: note = TnsF-Tn7 System Protein

SEQ ID NO: 5645 - protein, 319 aa, synthetic construct
  REGION 1..319: note = TnsF-Tn7 System Protein
MTEPTDLAGAAHLLLAQGVVHLDPEPAVFAAMLEGWAQQQRTRFLNHESTIKPRLSVVRRLADFSNQYPWQWQPAEAEAFFDFLRARRPNFAVSTARNYQNVLRMFCEYVTDERYEWPRVCLDRFGRQPVQILHEWNSITHASTYEGSPGRRPLSYDEVQMLFDAADEQVEAIRMRGRKGALAALRDAVMLKAVYAYGLRRQEACGLDLVDLRRNPKTPSYGRFGGVFVRFGKASKGGPPKRRTVLTVPEMDWVVDVLADYLSEVRGGFSPSKHPALWVTERRGRVSLRGLNGAFTRARELAELPEELDLHSLRHIVSA

SEQ ID NO: 5646 - protein, 107 aa, synthetic construct
  REGION 1..107: note = TnsF-Tn7 System Protein
MIRKMGVVWHLRLRMAEKGMFQTSALVPLLAERGVDLSREQVFRLVTQPPQRLSMDTLAALCDILDCQPNDLLEVKVVNAEVRKTAGEAGPAQPRPRRTTIRRPDLT

SEQ ID NO: 5647 - protein, 813 aa, synthetic construct
  REGION 1..813: note = TnsF-Tn7 System Protein
MTAQESSDRAVTDPIGLIVDLVAAVEHRLEPERIRAVVAGVAGGRAKSRRLAAHLAEHPSVLAEGRSPAPRAAGDLLIALREAGARAISPPCCAECGRQMRTLQRRGQDWYCGNCGPRPEPCAACGNTRRVATRDRAGRPRCAKCPDSDGRDPIAVIGALIAELDPHAGQAVVADAVRRSVPRPSYQQKIAWALEADPALLTGDGHLAPHRAILRLIDLLHEAGVAGIVRPSCPRCRRVVRIDKPLDGHRVCRTCIAHSRIEECSGCQARREPATRDDQGRPLCPNCLVNAPANLETCINCGRRKVVNARTPDGPLCSSCPAIPTMVCSICGEEKPCGTSRTTGRPWCPACQRRSASCSGCGGFWAVVSGTLDQPLCADCTAPEVWHTCPTCNDPDYPHPGQCARCLINRRLNELLGPPSDALHSGLEALRRNIATTEHPITARRWLNKPSVSPVLADLAAGRRALTHEALDELPDSPLLAHLRQVLVGVGALPERDEYMVRLERFLTGLLASQQSPEQRKLLHRYAIWHLVRRLRRRNNGRPITPQQFMSARQRTNAAVAFLNWLTAHDLTLDTCRRADLDRWLTDDLATYRQTAGHFIRWARTNKLTTVHVPAVRWNGPTQPLDDEHRWKVARRLLHDDTLKPEDRLAGLLLLLYAQGPSAIHRLTIEDVEVGAQEVRLHLGNAPVQLPEPVAALARTVAANRKGHATIGALAPSPWLFPGGQPGRPISTTQLTQRLNQLGIRPNQARSTALFQLATEIPAAILARTLGIHTDVAVAWQRLSAGDWANYAAEISQRAPRSLQQGKDVRDLR

SEQ ID NO: 5648 - protein, 364 aa, synthetic construct
  REGION 1..364: note = TnsF-Tn7 System Protein
MDLSSEQMAELRELAGSRDVPADVALRARIVLWSGEGRRRKDIAELAGVAPLTVDRCKARYTERGLAGLEDKRRGGPRTQVPPRVRARVIALTRMSPPVDSGLSHWSTRTLADHLKRREGVSVSWHYIARVWREENLKPHRSGTFKISKDPAFAEKVADVVGLYLAPPGGAVVLSVDEKTQVQALDRTQPVLPVAFAATEKRTHDYVRHGTTNLFAALNVTTGEVLGECKANRNGATFLAFMKKAVKPYPGKEIHVVLDNLSTHTTPDVKAWLAKNPHVHFHFTPVGSSWLNQIEIWFGIITRQSIRRGTFASVNVLVKQIRDYINSWNENAKPFTWTATADEILAKVRLVQTSVKKLVNNNSK

SEQ ID NO: 5649 - protein, 813 aa, synthetic construct; identical to SEQ ID NO: 5647
  REGION 1..813: note = TnsF-Tn7 System Protein

SEQ ID NO: 5650 - protein, 295 aa, synthetic construct
  REGION 1..295: note = TnsF-Tn7 System Protein
MSELYRFIHAEKANYPIVLLCRVLHVARSSYYAWRDGEAARRKRQAADDALAHEITVLHLASRKTYGVPRIHAELRRLGRRVNRKRVARVMRERDIRGVTRRKHRSLTRPDKKAKPAPDLIGRDFHAERPGIKLVGDITYLPTAEGWLYLACWLDLATREVVGYAMADHHRAELVIDALDMAHGRSGLEPDCVIHSDRGSEYTSAQFRDRIRELGLRQSCGRTGSCFDNAAAESFWALLKEEIGTRIWPDRATARAEVFTFIETFYNRRRLRKHKIFGYLTPAETRQRHQHALAA

SEQ ID NO: 5651 - protein, 295 aa, synthetic construct; identical to SEQ ID NO: 5650
  REGION 1..295: note = TnsF-Tn7 System Protein

SEQ ID NO: 5652 - protein, 373 aa, synthetic construct
  REGION 1..373: note = TnsF-Tn7 System Protein
MGLQRRADLAGAAHLELVSGVVQLRPQDAMVEAMLRGWRAQQAARGLREDTVTARERLIRRFLEYTNEYPWAWTPGHVDEWSLWLTSEKCLAPSTIRSYQGSLRLFSEFLIDGRYGWAVACEDAFGTHPVAICHEWNTIAHLNDYEGRPEARPFAREEIQRFLDYADDQVERAVRAKRKGALAAYRDATLFKVIYGWGLRRTEASKLDVVDFGRNAKAPQFGRYGTLNVRYGKAKKGQPPRRRNVLSVMDWAVEAVADYVENVRPRFGCEDHPALWVTERGGRIKPAEINARFVAYRDALKLPKALTVHSARHAYVTHLTEDGVDRRFLQQQVGHENDSSTAIYTHVSDDFMNTMLHKALAPALAPTSADKDR

SEQ ID NO: 5653 - protein, 113 aa, synthetic construct
  REGION 1..113: note = TnsF-Tn7 System Protein
MAAKLDYQWHLRKVMADRGLFSTTDLIPLLDERGINLSSSQVYRLVVERPERLSLKILMALLDILDCTMDDLIEPVAAAGAGSTGRIKKAVGAETGVGDLRPKRARVRGVERP

SEQ ID NO: 5654 - protein, 361 aa, synthetic construct
  REGION 1..361: note = TnsF-Tn7 System Protein
MQRAINGERYCRACWRQDPRSFDTCSRCGKHATIVARRPQLVCVSCYEAPHHPCGLCSHTDRIATRLDGVVVCPRCYYGMRYPRLCPSCGHQRLLTALKEGQLWCAECAGSPVTFACPGCGSVTEPRKHRLCARCRRPIVARYLLTSVDGQIRPELQPLVDYLGTHHPSAQSLERWMRKSTAAQALREITDGTLSLDPYALIDRVGSPQTASFLLSLLVASGTIPNLDAQRARFEHWFRNWLPTIGTTEEQRLLKRYDAWVLNSSMRSTRRDAFQRRRSMLLQTAAFLEHIRSSGHTVATFPQRELDVYLTGSDYRPTRPRRTPKTDSHGRRLSRPGVSGGRIPWKDLSHGTSQQIPARAS

SEQ ID NO: 5655 - protein, 1178 aa, synthetic construct
  REGION 1..1178: note = TnsF-Tn7 System Protein
MRVMSAGDGYKYLLRTVAAGDGDRSLSTPLTRYYAAEGTPPGRWMGAGLAALGAGQLTAGSGVSEKQLQLLVGMGLDPITGDPLGRAYPVYKSVAQRVEDRSAALDTSLSVVERAQAIATIETEEAAAGTRTAVAGFDFTFSIPKSASVLWAVADGGFQSLIADAHHAAVAEMVAYVEREVAFTRTGASAGDGAVAQVDVRGVIATAYDHYDSRAGDPHLHTHVVISNKVQTVLDGKWRSLDSRPMHAATVALSELHEAVFADHLTRMLGVEWEIRDMGRNRNPGWAITSVPEPLIAEFSTRARHIDEETDRLIVAYVEAHGHRPNPTAIMRLRAQATLSTRPEKTLHSLADLTAGWRERARAILREDAAVWAREVAMNDAPLLFRADDLPLDVIRSLGESVVASVGEKRSTWRRWNLTAEAARQTMGYRFTSMEDREAVVGLVVDAAEQVSLRLTPFELASSPIEFRRSDESSVFRPKNSTVYSSNLLLDAEDRLLERSREVTGPTVPLATIERFTRKPDREKRMLGEDQAEALARIAVSGRVLDVLVGPAGAGKTTAMLALRRAWEAEYGAGSVVGLAPSAGAAEVLAEDLGIATENTAKWWQNHINTGASFNAGQLVILDEASLAGTLSLERITELAAEAGAKVLLVGDYAQLQAVDAGGAFGLLAHNRDDVPELVDVHRFTHEWEKTASLDLRHGHVEALGEYEQHGRIVDGETEAMVDAAYAAWRADRGAGRSTILISDSNESVTALNSRARTDQILDGTVHGPREARLHDDSRAAIGDTVITRRNDRRLRAGRGWVRNGDRWNVLDVRTDGAVVARRLGASRGCSVILPASYVAEHVELGYAVTSYRAQGMTTDTAHVLVDPSMTRENLYVAMTRGRTLNRAYVAVDRPDAAHNVPHPSDSGAASGRSVLCGVLQHVGSEPSAHEALVAEQEAWGTIAQLAAEYETIAAAAQRDRWAALLRTSGLTESDASAAVESDAFGPLTAELRRAEANHHNVNALLPRLVRARGLDDAEDVAAVLRHRVAAATARPAGSGRSRVSPRFIAGLIPEASGIMSSEMQRALTERRTLMEDRADAVLDRALAEGSAWVTSLGAQPADPQRAAAWRRAARVVAAYRDRYQLTVDAALSAQPESTTQKIDHARAEAALRTIVKLDARRQSEAPRRAQETRGVRL

SEQ ID NO: 5656 - protein, 1178 aa, synthetic construct; identical to SEQ ID NO: 5655
  REGION 1..1178: note = TnsF-Tn7 System Protein

SEQ ID NO: 5657 - protein, 1048 aa, synthetic construct
  REGION 1..1048: note = TnsF-Tn7 System Protein
MTSFNENIIELAALEYFAELGFHRLHGPDLAPGEPGAERESYEDVFLWGRLRDAIRRFNPGVSPAVADEAIKRVQRAESQSPIDENYRLHKLITEGVPVEHREADGTLRTSRVTLVDFEQPSNNDWAAVNQFTIVENGKNRRPDVLVMVNGMPLALLELKNPTAEHATLKSAWNQVQTYRNDIPSVFVPNAVTVLSDGTSAAMSSYTGSFEHYAPWKTIEGREVVSSLPALEVLIKGVFEPKRFLDLLRNFVVFSDETATDQATGQPTRVLVKRVAKYHQYWAVNAAVESSVLASRPDGDRRGGVVWHTQGSGKSFEMVFYAAKIMRDPRMANPTLVFITDRNDLDDQLFGETFAPARILPETPVQAETRTDLRAKLKRVSGGIIFTTLQKFAPGEDGDADPMLTDRRNVVVVADEAHRSQYGFSEKLDRHGRLRAGLAKHMRDALPGATYLGFTGTPIESNDKSTRSVFGDYIDIYDLTRAVEDGATVKIFYESRLAKIDLSVEDYAALDELAEEITETAEEDAAIAAKSRWSRLEAIVGADSRLDMIARDVVEHWEKRRESLFGKGMIVVMSRRIAVKLYEKIVALRPDWHSDDPTKGKIKVVMTGSAADPAEFQQHIHSKDVRKDLKLRAKNPNDELELVIVRDMWLTGFDAPSMHTMYVDKTMQGAGLMQAIARVNRTFRDKPGGLIVDYIGVFANLQAALMEYSPSDRDQAGVPIDEMVSIMLEKHDIIRGLLHGVDYDSSPALSASQRLAEYAKVLDFVMADPDRTSRFNDQVLALAKAFALAGARDEAGAIRNDVRLFTDVRAAILKIQNPDSGRGGSGAVEIDTALGQLLNEAVAADQVVDIYKLAGVETPELSILSDEFLDSLAEKDKPNLQMGLLRRLLNDQIRTVQRTNLVQARKFSELLDEAINRYTNRSLTTAEIIAELVKLAKQMRDDQKRHEELGLREDEVAFYDAIVQNDASVLELGDDVLKEIAQKLVKAVRESTTIDWNLKDSVRATMRSKVRRLLARYDYPPDAEAKAIELVLEQAELFATGESDGGGR

SEQ ID NO: 5658 - protein, 886 aa, synthetic construct
  REGION 1..886: note = TnsF-Tn7 System Protein
MMTGRIAADVLGDMIVADGAYKQDATTLEAHVSQAFLVGTTSASLNDDLVDRLLRYADILSHSTSEQYREASYTLIALLREYQELVGLSERSTNRVAAVAAAVLVELGNFPGLRTLANGSEVEFTLPMSRGILRAAKEVVQATKHGKQTLTDTQYQITERMRGEDYFSFSGPTSLGKSFILKDAIYDIVRRPDLDQHCVVVLVPTKALIGQTAADLRSLLQDVPEVNVATFPSLPRFLRRTYPRTIFVFTPERLLRYLADAKRDIDYLIIDEAQKVISKKDARSSIYYHAIVEVTRRYATKLIFASPSIQNPELFLELFGKATNGALAVMERTVAQQRYFVDLIDRKQYYLSGSDADQREMDRPPTARTPIELVTSLSGARKSIVYINSSAKSADFAIELAATLPEVQDEMIDKLIKFVKEHIHKDYYLVKTLKHGVAFHHGKMPQEVREKVEALFSDPDSRLQFVVCTSTLLEGVNLPAKNIFVLNDTHGPSGFGKIDFENLAGRAGRLTYDFSGNVVCVRHEPGAWNQTTRDLIPRGTPITAESFLVNPGRKTKDFTDIGKVLQGKPLASGTSNDAKRAVEQYSSILLLHLLGKQQTPLRTLFMEKVTDGSKILDKAASEFTGSVEVLRRSPGILPKYQNLVWDSLVMGVDGPLIPADTEELNYELFERVLVRLGALYDWITTESGGLDPLVPSTEPGYSKRVRYWAMLMSYWVKGDPLVLVIKRTIAYHAKQGTITYRDFNKSPYPIDEPFDANSAKHINIIIESMMRDLETGLRFKIISYLENYHDLSVQALGVNNAGFNVAKLVEYGSSDSKVINLQEVGFSRAVALELLDKHGSLLTFTANDELDAVDVESLLSIAELDGDVRDEVENILRKSPQQEVPT

SEQ ID NO: 5659 - protein, 234 aa, synthetic construct
  REGION 1..234: note = TnsF-Tn7 System Protein
MEGGLGFLRGRTRPATPAIVAFIDEHKDRTDGGLRWGVESICAMLTQHGCKVAPSSYYDARSREPSAREVSDERWKPIILATWRKQRRLLGARKLWLRLRREGHDIARCTVERLMRELGIAGVVRGRRKNPVDADPRESRPADLVDRHFARFRTNQLWVADFTYVWTWSGWVYVAFVFDAHSRRILGWRAATSMTTPLVLDCLEMALWINRPDFRSVLQARMEHDEQEVFAGDA

SEQ ID NO: 5660 - protein, 412 aa, synthetic construct
  REGION 1..412: note = TnsF-Tn7 System Protein
MNRKYSPEMRERALRMLAETRPSHPNMMSAVRHVAGLLGMSPETLRLWQRRFEVDPGVKPGLTTDAAAEIKRLQKEVSELRKANEILRAASIFFAKGARPPLDEMIRFVNEHRDRFGVELICQVLRPAVRGFFTSRGYRAAVGRAPSARQLQDDLLVPEIARLHAENYGVYGRRKMHALMRRQGWDIGRDQTERLMRLAGVRGVRKSKRVFTTRSDTTTVLPSDLVNRRFTAPAPRRLWVCDVTYVATWSGFAYVAFVTDVYSRRIVGWNVAATLRSEILPMQALDMAAWNAGGRLDGLIHHADHGSNYTAMVYTERIVELGAVPSTGTVGDSFDNAMAEAVNNLYKTELIRQRGPWRTVEQVELATLEWVWWWNNSRLHGELDMRTPAEVEQAYYADQESANPAPVGQGSR

SEQ ID NO: 5661 - protein, 113 aa, synthetic construct
  REGION 1..113: note = TnsF-Tn7 System Protein
MTMIELATTWNLRSVMASRGLFQTSKLGPLLAERGVDLSREQVYRLATNKPQRVRLDVLAALCDALECSLTDLVTVERRERPAVRIAAGEEGTRASVGDLRPVRASIRRPGSN

SEQ ID NO: 5662 - protein, 490 aa, synthetic construct
  REGION 1..490: note = TnsF-Tn7 System Protein
MSEADDPDCWICGKATNWQRYEVPQGALCLGCGRRRHYHPAPCPVCRVRRPLAFLDDQLVVCAGCAGVASPFACRECGSEEHLYGRHRCARCFLRERLSALLTDPTTGEVNSRLQPVFDTLIESERPQTTIWWLRKKPGVGAVLLGQMARGEVPITHDTFRGLPQDLAHGYLRHLLAAVGVLEPFDPYIERMGPWLDGFLDTVPERHRELLRRFGRWHVMKQMRHSASVGRLSRGTADAARHRVRIASKVLAYFDGLGVTAQTATQANLDHYVHSRGRLCGEHGFIRWLRTTGVNPRIRLPTQPQRPDPAVTVGEDHRWELIDQLLHDPSIKPYTRIAGLFTLLFAQRMADIVAMKTSQISHADGLLHVTFNNTAIAMPPPLDNLIAGHLTERGMSLHASRDTGWLFPGGSPGRHIATENIRKQLVAIGLKPYEGRKATLFQLAADIPAPVLGDLIGISHKNAADWARLAARDWRSYIADRSLSQSPRQT

SEQ ID NO: 5663 - protein, 490 aa, synthetic construct; identical to SEQ ID NO: 5662
  REGION 1..490: note = TnsF-Tn7 System Protein

SEQ ID NO: 5664 - protein, 1168 aa, synthetic construct
  REGION 1..1168: note = TnsF-Tn7 System Protein
MSAGSGYQYLLRSVAAGDGSRALSTSLTRYYSEVGTPPGRWLGSGVRAFGNGQLGAGMQVTEEQLALLIGMGRDPITGEQLGRAYPTYKRLADRIDERVAALDPEMIQEDCAAETSRIEAEETAAGMRHAVAGFDLTFSVPKSVSVLWAVADAATQEQIADAHHAAVADVIAFFEREVAATRAGISDSDGAVAQVSVAGVAAVAYDHFDSRAGDPQLHTHVVVSNKVLTVMDGRWRSLDGRPVFSSVTGLSAHYNGLLADRLSRDIGIDWELRERSADRNPQWEVVGVSDELIAEFSSRTREIELKKDELIGEYVARHGRMPSPKVIVELRAQATLATRPPKELRSLADLTADWRRRASERVGADATAWAATLLSAGGTPLAVDDVPLAAAEAIAADVVAVVEVKRAVWNHWNLMAEASKQAMDLRFATTSDREAVVAMVVEAAQRQSVSLTPPELASSPIRFQREDGTSLFRQRHAAKYSSTAIIEAEARLLDRSEATTAPTVRRSTLARVVRHSNGRLSTQQRTALESITSSGRNLDLLVGPAGAGKTTTMRALRAAWIIEHGQRSVIGLAPSATAAQALADDLGVTCDNTAKWLHEYDNGRTDLRAGQLVIIDEATLAGTTTLDRISGIAEAAGAKVLLVGDPHQLQSVEAGGAFALLVGRRTDAPELTDVHRFVNEWERHASLALRRGEVEVISTYIRQKRVREGLTDEMLDRAYEAWRADCSAGKASILVTESSHAVRTLNERARAERLLLDGAVDGREIPLAAGNSASVGDVVITRRNERTLRTSGGGWVKNGDRWRVVDIRRDGSVLVDRLDPRRRGRAVLPPDYVGEYVDLGYAVTAHRAQGITVDTSHVVVTPTTTRENLYVSMSRGRESNIAYVALDQPDDSHSTPGPDDVTARTVLFGVLQHSGASMSAHQTMEAEYAIHGGIDRLAAELETLAADVQRDRFLELLRRSGLTPEQHEAVVQSSAFGPLTASLRRAEAYHHDLEKLVPRVVGQNALDDAEDIAAVLRYRVEQAAASPPRGCRLRPRLIAGLIPEPLGEMSAEDRQAIGERAELIEARALALAAAAVDAGAPWARRLGRPPTDPKDQTPWMLAAATVAAYRDRYKVSSDLPVGGGATADAQRADRRRAVQAARRAADSAAESTPAGRKVVADLRAVSAR

SEQ ID NO: 5665 - protein, 1168 aa, synthetic construct; identical to SEQ ID NO: 5664
  REGION 1..1168: note = TnsF-Tn7 System Protein

SEQ ID NO: 5666 - protein, 474 aa, synthetic construct
  REGION 1..474: note = TnsF-Tn7 System Protein
MPLFSQSTNGTASAAAKLGSPVTAPPPSGPDVEWSVVSELRARASEQLSQAVASDRSRLDKAAQQELGRSIVLDLIESAMADDVDAGRGAWSPARQQATAQAVFDSLFRLGRLQPLVDNDDIENIVIVGHDNVLLELVDGTLIDGPPVADSDQELIDFLVFLASRSEVNARSFSEAQPRLHLRLDGGSRLAAAAWVTPRPSVVIRRHRLMQVTLDDLVAREMMTPTAASFLRAAVRARRSIVVAGAQGAGKTTLVRALCAEIDAMEAIGTFETEYELHLHELGRHKVVHAWEARPGSGERGPDGRQAGEFTLDEALVDSFRFNLSRQIVGEVRGKEIWAMIKAMESGTGSISTTHAADAVSAVRKLVTCAMEAGPHVTQGLATSKLAATVDLIVQLSMETKAVPGGAQRTRRVAEIIALAPGEKEVGYATTHVFRADASGVAVPDVLPDEYRALAHYGFDLAGYLSTQPYGAQP

SEQ ID NO: 5667 - protein, 474 aa, synthetic construct; identical to SEQ ID NO: 5666
  REGION 1..474: note = TnsF-Tn7 System Protein

SEQ ID NO: 5668 - protein, 369 aa, synthetic construct
  REGION 1..369: note = TnsF-Tn7 System Protein
MDVPGAVPLSLAAGVVHLDEPAAVFAAMVSGWERQQKSRLLGDATVAARLALIRRFAAFAGSYPWEWNAGDVEDFTMSLMSGDAKLAPSTIRGHHVSLKLFCDYLLDGRYDWVVQCETRFDQIPSQVCHDFNTAVHLAEYEGRPERRPFNYDEVQTLFDYLDDRVDRIARSGKKGALAALRDAQMIKTAYAFGLRRRELCFLDVADLRPNAAMPQWGTYAAMHVRYGKSSRGSAPRRRTVLAVPEFDWVIDGLRQWVEEARPLLAPGKRGELWLTERRQRVALKTVDRRFASLRQGAGLSADLTLHCLRHSYVTHLIEFGYPERFVTEQVGHSYASTTAIYTSVSNDFKTKTLQAALARVYRVHETEEQ

SEQ ID NO: 5669 - protein, 109 aa, synthetic construct
  REGION 1..109: note = TnsF-Tn7 System Protein
MSGNKMVARWNLRQLMAEQGMFATSDLLEPLHERGVELSRQMIHRVVTKTPQRINLDLLAALCDILDCTPNDLIEMRVEQAVAPAAVNDAGPGIGNLRPIRAKVRRPGE

SEQ ID NO: 5670 - protein, 478 aa, synthetic construct
  REGION 1..478: note = TnsF-Tn7 System Protein
MTEVKIEQVCNGCEKSVTQIKKRYKGLKYCSTCYARLFKKSLCPKCGLSARLPKHDNQAICNQCIKKQPCIRCNLLNKPIGKLTEYGFVCNSCSVYFREIERCERCNVQSQKLTKVSRFNDDLRVCPKCSTRDYETCSSCHKYRLLESDENGKKLCKKCRVLPNKPCLECKILISAGCADLCDHCYWRKNLWIKFNQNIHLFESSFLKKQYENYVHWLATSVGEHQAALYLNKHTHFFIKTEVLWTDTIPDADQLLQILRASGLRKFELVVQWLDQIHGVKILPVNKKECSEIDQAKRLIKQLPNPSLAFDIVSAYKKKLDAKMAQGRTTARSVRLAIKPAVALMLTIDHKHNLLPDLRSIKAYLAQYTGQAAALTGFINFLNDHYDTNIDYISLKKSSFINDASKKKLEQDLLKIMGTDHAVDVIAWVRKSLQYFHNMSNQKVIGVKAEMITEEQDGYTVLYCNQSYWLPKHSSRFK

SEQ ID NO: 5671 - protein, 478 aa, synthetic construct; identical to SEQ ID NO: 5670
  REGION 1..478: note = TnsF-Tn7 System Protein

SEQ ID NO: 5672 - protein, 236 aa, synthetic construct
  REGION 1..236: note = TnsF-Tn7 System Protein
MKRISEEYSPVRKVQTVYGSISGNYSFRGEKTIWFESTLERDFLFKQEYNSNVIDVVEQPISIPYVTELGNESIYTPDYLVQFSSAIYDDLDSFPAPLLIEIKPRQKLKEDWGKLRPKFKAAYTLASEKGWKFKIIDESRLYDQYWENINFLKRFRRSHVDEVDQRVLVETLSKLGHSTINQLPAYIFKDQKNILKAIHQIWALVSKNILVCDLYRPFTAETVIWVNDKSVVQGVI

SEQ ID NO: 5673 - protein, 637 aa, synthetic construct
  REGION 1..637: note = TnsF-Tn7 System Protein
MLQNDSVKIDRSRIVIKPNAIVGYKGEKYKIINILSASDVVIANLESARSLQVSISELSRLGEDENLNSILNKGEDISSESWQIALDRYEIIKELIDHSTVEAVKKIANEHNLHVNTVWKWLKAYRENKSILALVPKKRGWTTEKTRLSPELDNIIRQAIHTKYLTSLKPSIAKTILEVKLECFKRKIEPPHDNTIRYRIDALNAYEVTKARLGKKAARDKYEASAGTFPNADYPLAYVQIDHTPLDIEIVDEQYRQTIGRAYLTLAIDVFSRMIAGYHLSLEAPSTTSVAMCISSAILSKKRKLLELGVDGDWDIEGIMDSVHSDNGADFRTNHLRKACLKYDINWEYRPIGGAKYGGHIERLLGIVNLEMHVLEGTTKSNIFEKGTYDSAENACLTFRELEHYIVYWIVNVYHKSKHSTLEIPPQQMWEEGVWGTKFRVGTGLKERVADEATLFLDFAPEFESTIQRTGVQKDKLFYFADCLRPWINAIDPMDDDKRRKRKFLFKRDPRDISMIWFYEPNTNTYFKVPTVKREIPPISLHEYKQVQTYLKSERLDTVDQDAIYRAIIYLREKVDESVTLTKKQRRMNQRRKENAKVTTELYHENKKNIDSNTSKDELKSQNSLWDKNLTAFDDLR

SEQ ID NO: 5674 - protein, 406 aa, synthetic construct
  REGION 1..406: note = TnsF-Tn7 System Protein
MKKVKYTPEIRDRAVQLLIESEKDYPSNWAAITAIAPKIGCTPETLRVWYQKYLDKQNPVKVQQLSDQERIKQLERENKELQRANEILRKAAGFFRPGGARPPTQIMVDFIHNNKDRYGVDAICRILPIAASTYYRTLDLADNPEHRAKRDLHDEHHAEQIQRIWKESSGRYGVRKVWQQLKREGYVIARCTVARLMQKLAIQGVWRGKNKQTTRSRDDQKRADDLVKRNFNADHPDQLWVSDFTYIQTHSGWVYTAFIIDVFSRAIVGWKVSTRMNTDMVLDALEQALHDRGMPKNVIHHSDRGVQYLSIRYTNRLEAANLRASVGTTGDSYDNALAETVNGLYKTEVIEYLKADWQGLADVQLATLNWVDWFNKKRVHSALGYVSPFEFEAMYYDKINPLGQVA

SEQ ID NO: 5675 - protein, 646 aa, synthetic construct
  REGION 1..646: note = TnsF-Tn7 System Protein
MISIQNLLKNVSVARAEFKAQNESVFSSFVKPPFYEQINILNAQHSIALVGGRGSGKTMYLKYFSHWSQLDITATPTTDSLKNVILYWKPNTIFLRSLERGWIEEKYANQAFQSFVSIEITKEVISFLSNALHHFPDDILLVLEQSNFIKKINQIFELSIDSLQEANIHLDLLMGEISSKALNEDNFKILSPENIIKILVTSLTQTKLFKSLSIKIFIDEFENLSINQQSYINGLRKHSNSMISWNVAYKAFATVSNYVYTNSPDSEQLQKQNDYRVIDIDNIIKNYHDKKNIRAIDGFFSKILLVSINKEQFLTYEFSESLALVSHILKQNSLKELVVKYSDSNKNFIPRVLKQLSDLKEPIGEELFNKIGENPYLAISLTVIKKHNNFSIETLKSYLDKTIDDVSKRKFEEKQNHYIPAAIYKLNIASSYNNIPIYSGFDKFMTLCSGNVRHFLELCYQSFQLYFAEQTNNEDDTIEITSMKSISSQLMHKGATQTSEELVKEVISFAPMGQKLDMLVSRLGELFRISHQADVITEPEQNHFSLTTGTVDEKTQKIISQALCWNVLIEHRITKERDIDRSLKDYQLNPIYAPAFGISYRKMHKVSFSVANFQIICGTDNHKWENYRNIFEGNNAKIEPVQGGLL

SEQ ID NO: 5676 - protein, 646 aa, synthetic construct; identical to SEQ ID NO: 5675
  REGION 1..646: note = TnsF-Tn7 System Protein

SEQ ID NO: 5677 - protein, 363 aa, synthetic construct
  REGION 1..363: note = TnsF-Tn7 System Protein
MPSYAQNWFIHTPIEDGEVLSSWLIRSALDIGCSPLALTEALWGKWRALTIDLDRGVTENRLELLFEHSFEDRQKILQTMLSNVAPYLIKNSTNTWILNLGQRSRTNFSGRQVCTQCFESDGKSAYLRLMWRMGWHTYCEKHQINLIDHCPDCGVVIQPFKIDLQHGSLAVCSSCGYNFIKYQSQIKNIKILDFQKNADNVLTKGLGLYNNQSISAAEWFEIVRAWISEIRYLVNTNNVQLVEMFESFGVSLNLEFPLTPVAFEYLNTNERIILLSILDQIMKIPCELIISRSHEYGVSSANFWDKRKKLPIQLQLMKSAMIQPVKMYALQRVNLSNGQPKSKKTVQRKWLNLLRKSRKTRSN

SEQ ID NO: 5678 - protein, 491 aa, synthetic construct
  REGION 1..491: note = TnsF-Tn7 System Protein
MMIQPVHDFQMCDECGKNVAKIWRVHKGHKFCSTCYARVFIRRMCPKCGNFARLPKNDASAVCLSCQVDKPCARCGATDYSIGRITQYGPVCTSCAPYFRQQKPCEICGGLSSKLTRVSRFDHDKRVCQKCARSDHGNCGACHRHRLLETSPDGRWLCHACLTVGEIPCPECNQPMPAGRKKRCESCYWKGLLKKRIAMDCAGFSVPAMALHFSNFGGWLGENVGTHKAAITLHRYLPFFLEIEKQWQSIPEYAILLKHVGTSGLRKVLLPMKWMQEAGLVVVDAGAKAEDSDQRRVAVTLEKFKTGTAQRAILDGYHDQLLTAKKKGKTTWRSIRLAMTPAAALLLHAAAKEVCPPDQKALDTYLGKTPGQRAAVSGFVVYLRDSHIVNISIAPSSNKDKRAKKKRLENKLLRLLAENDQSKSSRLKLLAVAMAYFHGVAQKDITGKVMESLVAADDGDGSVLKANGQAYWLPGKFQLKPFLTPSNAWTY

SEQ ID NO: 5679 - protein, 491 aa, synthetic construct; identical to SEQ ID NO: 5678
  REGION 1..491: note = TnsF-Tn7 System Protein

SEQ ID NO: 5680 - protein, 232 aa, synthetic construct
  REGION 1..232: note = TnsF-Tn7 System Protein
MQNQCDSVRPKQTRKIKPTRRSVSGIYPFRGETATPYESTLERDFLIRKEFSLSVLDIIAQPVQIPFTANNGQAYTYTPDFLVYYRIHKNTSLAACQKPVLIEVKPETQWRKHWREWMPKWKAAYRYAKEQGWEFHIHDESRIRDVVFDNISFLAIYQRMNFAIEETRWVLENIRSMGVAPFHYVLARHFMGSMFERQGRAHIWHLLATRQLDCDITRPLDDFTELWIPTNE

SEQ ID NO: 5681 - protein, 642 aa, synthetic construct
  REGION 1..642: note = TnsF-Tn7 System Protein
MSDADDMPNPEFEACRHRLDVQVGALVKSEHLIYRIAQIIDFESVVGTAVETGRSKPLRILELQAVTNDDSGAKHDPHLDMAGIGDSDWKVAEERFAAIQPLISAFSPGRREVELRAKEVGVDTATLYRWLQKYKGMKNVAALIPKKSGWIQGRGRLNSQAEGVIADVIKNYYLTPQRPTPTKTVTEVLRQCQLRGVEPPHPSTIRSRISDVSEKERLRGRGFKERAKNKFLPVPGHFPNADYPLAVIQIDHTPADIILVDDLYRKPIGRPWISLAMDINSRMVTGYYLSFDAPSETSVAMCVAHSILPKDEWLMLHKVDAEWPVWGMPKKIYVDNGTDFRSDNFQQSCTMYGINLEFRPVKTPRYGGHIERVLGTFMREVHELPGTTFSNIKAKEDYDSEKQATMTKSEFETWLVTLICKVYHQKMHSGIGMTPVRKWEIGIFGNASVQGVGIPPIAANRQTVLLDFLPHFLRTIQAFGVTIDGMTYYADILRQWINAGDPADKTKKRDFIFRRDPRDISTIWFFDPEIKQYFKVPFADQALPPMSIWEYQQARDALRREGKKSVNEHQILHAITELRTQVDASKERTKTARRQSQRRKEHEKKVSPAAPLPQPVQTPLISLSAAGSGLVDGDLDSFGDIA

SEQ ID NO: 5682 - protein, 401 aa, synthetic construct
  REGION 1..401: note = TnsF-Tn7 System Protein
MSQSPESTQEQFFHRPELAAALADQALDTSLGSSGGMFLAAPRRTGKSTFVRQDLVPEFERRNLNVIYVDLWIDKTVNPAIHIASAIRTELAREDGAVANALKKLSKLSRLTVGAWGHGLSFDLSQLNLSKDATLADALKALSKASQKKLILVIDEAQHALTTDEGINALFSLKAARDSLNTDQGQYGMQLIATGSNRDKLATLVNGREQAFYGADMVQFPTLGKDYVQWLVGRSKLHLDNDLATDVFQSLGSRPEPFRKALSQTRLQLALNPAQDSDAMLASLAAKGVRDSRTDFLNTVASLPPLQSALLRELAADSLLGPDVRRPGLFSAAMKARLLARLADEMGADHGVSVETPSVQNALDKLREANFLWRSQRGSYSVEDEQFLEWLAQDKDLNGIQ

SEQ ID NO: 5683 - protein, 401 aa, synthetic construct; identical to SEQ ID NO: 5682
  REGION 1..401: note = TnsF-Tn7 System Protein

SEQ ID NO: 5684 - protein, 352 aa, synthetic construct
  REGION 1..352: note = TnsF-Tn7 System Protein
MPDEIISSWLVNTALIQGCDPMTLTLAVWPKWRIWTNDGDRIFNEDRLDPICALSGIKKVTLMSASLFPIAKQIYGKRPPEKGVWTWFLAPGARNTKRHSGIQYCPFCLKSDAKPYFRIQWRFAWHTGCKVHGHALLDRCHDCNAPVEYHRLLAEDKVITVCGTCKVDLRAASVRSCLPEALKFQLMADDVLINDVGLFQGSAMNVTPWFELANYFVSLIRVAQRCENEPLSEFLRLIGVQLPESIPMRPGNHLEILNTHDREGLLAAIFPLMSASKILFEEALQKSNITRQGLAGHRMVSPTWIRTTAASLPSTLREKSTRSTARLDGPRSRYQVKRMMARLQRKLDMAQR

SEQ ID NO: 5685 - protein, 1027 aa, synthetic construct
  REGION 1..1027: note = TnsF-Tn7 System Protein
MTLSILHLSDIHIKERNDSILRRSGQIASALNPYLSNTTAVVILVSGDVAQAGTRAEYELANKFFSEILEALRRETEVPIHFVISPGNHDCDFSGDQDARIAIVQATLKRSGEIPGSYVEMGVSVQKDFFKFRAAHETTTAIQFSDALWTTYAFEVAGKKLLFDVLNASWVSLRYEQQGGLLFPFERYEKLKDNACDLRICAIHHPLNWYGQTNYLPFRSFLHRISDFLFTGHEHQSAGRLTDDAQDGECIYIEGAALQQRSSAHSGFNIVQVDLDSKKFKYEKFEFEAPRYEPKEAGVEWNDYRALPKRAVVAMALTEEFLKAIKDPGATLKHPTGRQLELSDFYVFPDLDFKSGKEPDDLKLRNLKKLNSRVLCNLEGLTQNVLLDGDDSAGKTRLLFRLYSEYHAQGYLPLFVRGAKVKSCSLSEIERQLDAALSAQYGDLNKIAFKQASKAKKILLLDDLDLSPLNRASRSKFLEIIIPRFSRVIITVGESYELAEFFDGDAISELALFNHYKILELGHERRSELIRKWNSLGIDETVSHNQLLAMCDQAEDLIESARLQHIASTVPIFVLSLLQAAASGITKDQQNSSFAHYYYFLVIGALEQGGVKPDDMAPYLAACTHLSWFMKKNGHEHQISRHQFDRFIREYSDKWTQTDGALLLQTLIAANLINQDVDCLGFSYPYAYYYFLGRYTNLAIGEEDVKEYLRHCMKNLYVRECANTLIFLAHNSGNSVVLDHIVGALEEHFPNSKPVTLSKEDVKSVAKLISFAPSIKYKAQKPEEYRRIQAQKRDEESANHDGLAEKPNGNDKPRDILQEMVSLNKSIEIAGALLTHQYSNYSRSKKDAAVKAIFDSSLRAIREFYSIFEEHSEELVRAVTVRAKSRGNDLTSEQAELQTRYAIGYLLRAIGTTFVTKAGMHVTAKAISSNVTDVMGTNPSCAYRLIKIAQDLQRPSRLPRLEIKKLINEESENPCVMGVLQLLVLKRMYIYETDFDDKDWAISTFEVGGNAKSIEMKHRSPSAKRWE

SEQ ID NO: 5686 - protein, 299 aa, synthetic construct
  REGION 1..299: note = TnsF-Tn7 System Protein
MTTSTDFAHIHPDFRHIMGMTDKERIEFMDQPRWISYPLAQQILDNLQGLMHKPSKPRMQNLLIVGESNNGKTTLVRRFKDLCGKGYVDENSDPVKPIIVAEAPPSADEKGLYISILECFFTPYRATDPAAKLRYQVIHLFRLCHVKLLIIDEFHSLLTGTPVKQREVMNAIKLLCNELAIPIVGVGTREAVRVLHTDPQHASRFEVMNLPLWELNRDFQQLLAGFEKVLPLKKSSKLHVPELASLLHTISEGNTGNLHQLLIKCATEAITSGKEQIDKAIIEGKAWVRPTRGIRELVL

SEQ ID NO: 5687 - protein, 299 aa, synthetic construct; identical to SEQ ID NO: 5686
  REGION 1..299: note = TnsF-Tn7 System Protein

SEQ ID NO: 5688 - protein, 485 aa, synthetic construct
  REGION 1..485: note = TnsF-Tn7 System Protein
MGTIKTPITNCSMNITQIRHRNSCSICGKNQVTRKFQEEYYCANCYAKWFNKKVCKGCGQLKRIHRKGEFCLECEKHSDCVRCGKTAGTFEIGMISRYGTVCSSCVRYFREEKECSECGKMTRDRYRSPVTNQSVCLSCYRRYTFATCKNCSRYRKVHNQEKQLCKKCDEQLISTCPKCKSEMPSGYGNVCPDCARRTLLFNLIRLNVHIFRSKAIKTAYKKFIFWYMRKCSISVALHKGTDFMQFFIDCDDKWQKIPDYAELVTHFKPNGLRANLTVLRWLLDTNQVVVDETLKDDLAELERMQALFKKLKESVPCIATYYQMLQQRFDSGKTSLKSVRLALQPAIDLISSQAITDYPTQEQLNSYLVEKTGQTAAITGFINHLKSTYHCDLVIDRNLIQQMKAKLLKKRFSQRLVELCKQPELTVAEQMELVSVVLYSLHGIEIKKPKLDAIVLLDGVAYYRDKTKDYFLPQDIYLRIKPQFS

SEQ ID NO: 5689 - protein, 220 aa, synthetic construct
  REGION 1..220: note = TnsF-Tn7 System Protein
MKTEQTFKQIRKIQPTRLSVSGHLPYKDGISIPYESTLERDFLLYFTYMPTVAEIISQPTRISFVKNGMTYPYTPDFFIRFNDGRPSLLIEVKPKSKWQEHWRDWKEKWKAAMAFCKKNNCIFHIYDEDKIRHLALFNINSVQRYKRLQCDPEDIKAILSQVELRGGTTIDYLLSRFFTGSLYRTKGLQIIYHLLATKQLTCNWFEPLSEFTEVWSYSND

SEQ ID NO: 5690 - protein, 643 aa, synthetic construct
  REGION 1..643: note = TnsF-Tn7 System Protein
MTNLKENSFIHPRHHSKLERGRIVLRKGNIYVNREDGEQYELIEYLDENAQVMIRNIHTRQSKIASIYQLDNLKINERDDVCVDLSAISDEYWEKALEKYEMIKPLLSYEQHSPSSVKARAKEVGVSDRSLYRWIQAYNSLGSIAGLVARKRGWSEGSSRLTKEQDDLVAGVINDFYLHKQRPSIEQTIREVQRVSSLKGIDSPSRRTIRQRILRISEEERLRKRGQKEKAKNKFTPKPNSFPNVDFPLSVIQIDHTPVDLIIVDNQYRKPIGRPYLTLAMDIYSRMITGYYLSLDAPSVTSVAMCIARSILPKERLLQDHNVTGEWAVFGYPNKIHVDNGADFRSLDLSKSCEAHGIALEFRPVGRPEFGGHIERVIGTFMKEVHGLSGTTFSNTKEKDTYQSEAEAVMTLDEFETWLINYIVNVYHKRTHSALGMSPVQKWRLGIFGDKDRVGCGYPQMPVDEQTLLLDFLPSKKRTIQHNGVTIDGLRYYDVALNMYINDSDETGKSKEFLFRRDPRNIGKIWFYDPKLKRYFPIPFADQSLPDMSIWEYKQVRQFLKDKDEKLIHSQQINDALTEMREIVQQSIQRTKKARRQAQRQKVHAKSEVVIPTILPESKPREVVKAPVSSLLSNDEFTFGEIE

SEQ ID NO: 5691 - protein, 372 aa, synthetic construct
  REGION 1..372: note = TnsF-Tn7 System Protein
MGTTDTGLPKNYRIKSGVIRTPLYPDESISSWLIRAALDCGTEPIVFTGFYWEKWRLWTFDLDRGFEPIAPHIYEDIAALSLNRQVDLTAHSLYSVLQPINGEKTLIKGQAKWVISRSSRNRAYRNGQPFCACCLGQSPYLHNEWRLAWNFGCLAHQTRLETKCSACGEPYQPHLLSADKRQLNHCHCCGETLTVSGSRLTQLEIDTLALLDDVFKTNSGHCFQQQINAQTYFAILRYFINLIRRAAAMKPSHALARFIERLGIPQAELCQTKTALAFELLPVEERKNFVVNAVKILQLSREVLIQAIKQSDITQNAFAFEVYPAQLTPLFKYALEGKTVARKIAKSKPKTDTILTLNRQWERLKRQLQIAV

SEQ ID NO: 5692 - protein, 485 aa, synthetic construct; identical to SEQ ID NO: 5688
  REGION 1..485: note = TnsF-Tn7 System Protein

SEQ ID NO: 5693 - protein, 297 aa, synthetic construct
  REGION 1..297: note = TnsF-Tn7 System Protein
MEKQYEYVHEKFRHLVTASNQERIEFLDEPRWISYPIANKLIENLVSLMNMPKRPRMLNLLVIGDSNNGKTTLIRHFYDLYGIPFIDSQSDGVRPIILAEAPPSANEKELYISLLERFHTPYRATDSVAKLRYQTIHLFREYKVKMLVIDEFHSLLVGTPRLQRQVMNAIKMLCNELQIPIVGVGTKDAIRVLHTDPQHASRFDVAELPRWKLDKEFQKLLFQFQGILPLKKCSNLQSPELATKIHTISGGNLGNVHRLLTACAIEAITSGTEQVTLEIIEKNSWVQPTQGFRKIIG

SEQ ID NO: 5694 - protein, 297 aa, synthetic construct; identical to SEQ ID NO: 5693
  REGION 1..297: note = TnsF-Tn7 System Protein

SEQ ID NO: 5695 - protein, 538 aa, synthetic construct
  REGION 1..538: note = TnsF-Tn7 System Protein
MTEVNKVIRELETLGIYDVKEIVYNPSYEQLFEEETKPGLEGFEKGTLTTTGAVAVDTGIFTGRSPKDKYIVLDEKTKDTVWWTSDAAKNDNKPMNQATWQSLKDLVTNQLSRKRLFVIDGFCGASEQDRIAVRIVTEVAWQAHFVKNMFIRPTEEQLKNFEPDFVVMNGSKVTNPNWKEQGLNSENFVAFNLTERIQLIGGTWYGGEMKKGMFSIMNYFLPLKGVASMHCSANVGKEGDVAVFFGLSGTGKTTLSTDPKRELIGDDEHGWDDVGVFNFEGGCYAKTIHLSEENEPDIYRAIRRDALLENVVVRADGSVDFDNGSKTENTRVSYPIYHIDNIVKPVSRAGHATKVIFLTADAFGVLPPVSKLTPEQTKYYFLSGFTAKLAGTERGITEPTPTFSACFGAAFLTLHPTQYAEVLVKRMQAAGAEAYLVNTGWNGTGKRISIKDTRGIIDAILDGSIEQAEMRELPIFNLAIPNALPGVDPAILDPRDTYADKAQWQAKAEDLAGRFVKNFEKYATNAEGKALIAAGPKA

SEQ ID NO: 5696 - protein, 538 aa, synthetic construct; identical to SEQ ID NO: 5695
  REGION 1..538: note = TnsF-Tn7 System Protein

SEQ ID NO: 5697 - protein, 313 aa, synthetic construct
  REGION 1..313: note = TnsF-Tn7 System Protein
MPAGRKNECEDCAWEKSLDRRTRIHAELFANVSTRQRFNDFCLWLKTQMGAHKAALKLKHYVPFFTFLDAHPVGLPSYAFLLEHFSAEGLRRMQTPMLWLHARYGVTADEQLRKKHSEKRRIQEMIDSTPLGVGLDALLGYRAYLLLKQGDGSTSIGSVRLSLRAAKNVLAFTSEQFDQLPTQKTVAAYLTNTPGQRATAQGFIGYLNRTHGLSLSTELRERSVARAQNHKLEAQLYALLSAGGEGEAYERSWIKVALMALHGVRNVNKKELAYSAMAMQDVAGFNVVINAKNYWVPSPASAPGFLADRSEQP

SEQ ID NO: 5698 - protein, 603 aa, synthetic construct
  REGION 1..603: note = TnsF-Tn7 System Protein
MHESSLVSHQTATSFMLLHIRSCELFHRIKRVPPRENLCTTKDGEAINHIRNGTVVVWSYERIKKNFEAESIPLVEVVFRFLDRNDQPAGVTQASIGVGRLGSFRLGTIWQGGKCIAETDLGKDQEFSVDFTEGVWSYVSIYGNHQSAPYFKTDYPLRSQPTDKMLTEFLSFPLPDDKNLLIPCIEFLYRCYGSTSDMARILTTYPWPKVQELLYADTSKDPSRWLVKPQSIVPDDDGLFLAHALYNGYTEKVAKLLYSELDNAYGKHMKEIGLRVRPWFQGPANVKVRGRWINNHNTFLCYEVTGMSQPQDHAYEIIRAKYSSEDPKQDQTPRDTMRVKVEAPKPQDPFLITDHQEPDQGAFRWSKPDPGFQILGPKCPHTVSYDDRALSKKRVLPIPPGTVKVLSTGDPRGHNKGVGKFIAVAKRVQGDGGAIQAVWTELQRQEGQKRFSSVAWLSERQGFVQSTDFRLLALPAFTQSEAPSDKNRTWLAYRENAIRRRGILVVRIKVGARCFYLFELQRKKVRKGTVYSEQKMSGLLMEINQEAEALVEISRICDEIRTANGNFRNLRTGLKHRHNIFRHHSEVDTTIFYAFFHLGIRLI

SEQ ID NO: 5699 - protein, 313 aa, synthetic construct; identical to SEQ ID NO: 5697
  REGION 1..313: note = TnsF-Tn7 System Protein

SEQ ID NO: 5700 - protein, 183 aa, synthetic construct
  REGION 1..183: note = TnsF-Tn7 System Protein
MLERDFLSRMDFRRDVLAVRSQPVQLDFVSRSGRSYTYTPDYLVHFHSHTHLSPMLVEVKPAENWRENWRELLPKWKAALRYAKERGWRFHIYDESRIRGQSLKNIQYLERFKNADYAEQDLDPIIRTVAFKGIASVSYLVALHFQGAEALGRSHIFHLIATRQLDCDITGPLNDSLEVMVAE

SEQ ID NO: 5701 - protein, 639 aa, synthetic construct
  REGION 1..639: note = TnsF-Tn7 System Protein
MNDFVSEQPRSGKIDRSFVNIAPGELACYQKETFRITQVLDFQSVLAINVETGQPKVLRIGELKPFLGDKVRGPYADYDLEDIGAEEWAIAQKRYAVIAPLLGIEGQSRSVVERHAKDAGVDAVTVYRWLRRYKEQGEVTALIPLKRGWGKGRSRISEGVENVIAETIEDFYLTEQRPDVSSTVYEVRRRCKALKLSPPSVSTVQARIKNIPDRTRLRRRGDRELAGNKYDPRPGGLNTEYPLQIVQIDHTPADMIIVDDVYRRPIGRPWLTLAICVYSRMVTGYYLSMDAPSAVSVAMCVVHSILPKEKWLALHGVDAEWPVWGKMSTLHSDNGADFKTNSLVQSCVNHNIRRDFRPKKNPQWGGHIERWMGTFAGINKKDRGATFSNPAERREYDSEKQSIYTFAEYEQRLVRNIIKYNNKYHQEIDMAPIKKWNLAFFGDKEHDSILPLPPRVADPWGFQLDFLPATLRTIHPYGVEMDAMYFAEALRPWIGATDPETGKARKFLFRRDPRNINRIWFYDPALKEHFEIPIIRGRYAGVTVGEYVNAKKKARKAGHDAVNHDVIERMLDENKKQEAEAAVRTKQARKSVQKRTNNTKQTTPARPTPHVEPKFSPIGLSDSPQLLSVDEVDTFGEVW

SEQ ID NO: 5702 - protein, 133 aa, synthetic construct
  REGION 1..133: note = TnsF-Tn7 System Protein
MVQRYRNKLSGPLLDRIDLHLTVAREATALNPAIKPGEDSASAAALVAEARERQQKRQGCANAFLDLPGLKKHCKLSTADEKWLESACERLTLSLRSAHRLLKVARTLADLEQVDAIKREHLAEALQYRPATP

SEQ ID NO: 5703 - protein, 372 aa, synthetic construct
  REGION 1..372: note = TnsF-Tn7 System Protein
MDASYQCRWGQGASPVNAVWPLVPSLLQDEVISSWLMRCALAQGCDATTLTGEVWPRWRFWCSDSDRELSLEHAHRLSLLSGIPSVALQEATLQPLYQTMTGTPSFPRGIAPWFLCLGYRNRRRCGGLQYCPKCFKDNVPHYMIQDRLAWHSMCPVHQVILLDHCECCQAPLCPQLVAPPQETLGRCHRCGYELHCAPTHGGQANALSFQRATDGLFFLPVRRYGDQPLLLTEWLGLSRWMIGILRTAARAPSSRTQTFFNELGVDLTDIKPPSTGLPFEFLTPADRAVLLSNVWSMLAAGPERLIAVAECECIRPSLLLPRAGELPASLAGLRAVLKSRRRLNYRQSPIDNPRSVKSVLMRWQRLLRKFQR

SEQ ID NO: 5704 - protein, 297 aa, synthetic construct
  REGION 1..297: note = TnsF-Tn7 System Protein
MTDYAHITPQFRDVMQKSDLDRLAFLDQPRWVDYKAANNLMDILDGLLRKPERPRMPNLMLVGESNTGKTTVITRFKELSGQPYVSDDAVSVRPVICAEVHKPDERELYNAILREFWAPHNPVAPLAKLRHQAIHLLRDARTRMLILDEVHTINNGSAAKRMDVMNELKMLSNILHIPLVLVGTRTALQLLVLDSQYSSRFEVVSLPNWSVNVEFQRFLKSFESVLPLKCASKLYSPELTPLIHAISNGNTGNIEYLLRECAREAIRNGSEVIDRRLLEKNQWMRPTSADGVRERVL

SEQ ID NO: 5705 - protein, 297 aa, synthetic construct; identical to SEQ ID NO: 5704
  REGION 1..297: note = TnsF-Tn7 System Protein

SEQ ID NO: 5706 - protein, 458 aa, synthetic construct
  REGION 1..458: note = TnsF-Tn7 System Protein
MAEHKQCDQCKQHSDHFPRRYRGKRFCGSCYWYFFIKRECSECHQIKRIHRAEKRPLCYRCYSKVTPCSRCGRVGRPVGKCLETGILCNSCANAFRPDGKCSLCGRIATVSIGKKFGIDTPICDTCRNQLHPKCPNCGIRGVLYETASGVSLCYRCANGITYYCKSCHEPIKGAEKSYCNQCYAIRRNDKRTEVNAASFSTPEAEKLFRNFIAWLTSSVGPEKSAQTQNRYTEFFNAIQDAPKNWQSDVLYLATIDGGFLRKSSKPRLYLESIGILFDASALKDAMDLRTFNNNLTSIRENCGDEFRAQVDSFFDNRLVEYIDKKTKMLTIRIESSAVMRLFEYFVKLKDLDISLRAISTESPGLRCTLVAFLHFLSTHHNETFAFPKTDIEQRLVYLVRSFRGREVSSRHLTFYGHLCMAVFHSLEMNPNNHLDISIAGDGFNVLFGGQNYWIPSLN

SEQ ID NO: 5707 - protein, 577 aa, synthetic construct
  REGION 1..577: note = TnsF-Tn7 System Protein
MTELVIETFPKDGKTWMVAEFGKVKWNEAVPDEPLIQVILSHGSKKQVSITRTIAKSLTIYVTKGSTWVNGEKAGDIPTATTAIFRFDSLRDFQTISAWESYDSATIWDGNLGRHRDIRLYYIPPTKYSIPKDARDCHYHVYKANSGVDVVISSICLFDGLFGYSMKSKQIAFNNTAENAIKAMEFTGFNIDDYEEPPLENEEVIGLAKDIRDNDRFFLYHLKTSYDAQRAVNHISAQLTRNRHAESYITVNPWFTENHHWKVKGVWLENGKRFFVLQILNFMYPPSPDFFIIRENHNIIAENGERGATKRNTRTKNSNTRPNSASDRKPSSDALPDDIQVTGDADIWVNPRHRKAVPKDNKTKNQAMAPKEKHREQISTSQINQSNSDVGKGNLTQEPTEPDKQPEQPKVVPNAIMLIYKALLVLFRNGDIDEVECLDSTGEWVDVGNSDLPSLYNFPKSTTWGENRTKPPFRVGASKVYIARRAGVFHVSAQGEDFYFIAIERVRTESYRTGVYIGFYKVDFIIEIDRILKEVEKESGVWANLSGVVKSGYDPITHRGDANSIARQISMRMELAG

SEQ ID NO: 5708 - protein, 181 aa, synthetic construct
  REGION 1..181: note = TnsF-Tn7 System Protein
MLMEFDERVEKLVSQPIQLSYIDLSGRQQRYTPDYLVYFKTPNMKPMLVEVKERSEIKKDFEKLRLKFAVGIRAAKEKGWRFKVYDDTRIRGLLLDNIRKLRNFASHSVSDDIRDKILSEMRNIHLPITARDFLEHYTTSRREYLENIGRIWWLALQHDIELDLSEPLSERTRITQVKAHD

SEQ ID NO: 5709 - protein, 638 aa, synthetic construct
  REGION 1..638: note = TnsF-Tn7 System Protein
MTDTYKPSKSKVKLRRGTLVKLSDGDYFIKEVLNIKEVLLQKVDSKQIQLFKISEIISSVTENEPQDNLVSDDIQAIPAHKLKAAEKKLKAIKPLLELGPSASSRDVKIQAAKCNIHYTTLYRWLRAFSSTNSLVSLVDQKRGWSAKNNRIPEEVNKIIEHTIDTYYLSKDRYSPQFIYNKICQSCKQAGLKPPSQSTIYRRIDLVPEERRLRARGHIDIANNRYSARAGKFPNVDSILSVIQIDHTPLDIIIVDDEHRESIKRVWLTMAIDVYSRMVTGFYLSLDAPSITSVAMCISHSILPKDIWLKKLGIDLDWHVWGIPKKIHVDNGSDFTSDALRMGCKANNIALEFRPVAKPEYGGHIERLLGTFQEKLKALDGKTFNSAKSRASYNSEKHAIFDFDSLELWLTNAIIEYHHTKHEGIGVAPATKWEMSVEGELEELPRGLPDIPTDPLSIELDFLPYQRRTIRSQGIVWDGIYYFSDSIRHLIGAIDRETRKPRKFIIRRDPRNIRHVWVYDDEMKCYHKVALADPTLHFTSVWELNEAKAYLKQRGESDYNQEMLSRAIQNMNAIQEQAAKATKDARRRAQQKKNHESKVSPATHFENGEKDQPTSTTPSESPEADDWGDDDDVVIFDIE

SEQ ID NO: 5710 - protein, 572 aa, synthetic construct
  REGION 1..572: note = TnsF-Tn7 System Protein
MEDMLSDEAVEYRADHMTLAELEHLSVETNFYNTVLRKLLARGSKVIVGPRGVGKTHHMRLAYKQCLEQTNKPMPVYVSFSKYLRLEPLRNSSSIAIQYFHCWVISKCLLGVRETLLQLIKNYSSDTLNESEISWSDIELFCEQIEKQQTKDWHSRLLDHLSVNFLTSFIESSAELCGRKSTIVFCDDAALVLTKDYMIEFFDIFRSLKTPRIYPKASVYPSTEFGPRFHIGQDAEPVPCWPSIEDAEYQKLFHTIYDKRFSAELKSDVKMCFAYAAFGVPRAFINLVNRYQMERKKTEQGKINIIIDEQAQLLLDEYMSLAIKQPQFGKYVSAGKHIINCICRHIATDNAEKLKSNKQQYILGILQGGIEGKAEQNKVDTIIQLLEEIGLIHKLSPVRHGYYSDRSPRVYDRYIPHFTLLLSHGAYQVGSAGYITGFINAISKPKAQPYRKKSFIDFYEEEAFKSLSLDLPDCASCGNARSSQEQRFCMYCGAELINPSTFELLIKTKIDKLPLTKFLKERIRTETNIETIGDIALANNPGQELRKAKGIGKVKASKVIEQAKVWMEEYLS

SEQ ID NO: 5711 - protein, 572 aa, synthetic construct; identical to SEQ ID NO: 5710
  REGION 1..572: note = TnsF-Tn7 System Protein

SEQ ID NO: 5712 - protein, 230 aa, synthetic construct
  REGION 1..230: note = TnsF-Tn7 System Protein
MWEVTGSPPQPGEISLAHRSLLFLDELPEFARHVLDSLREPLESGTVTISRAGHQITYPADFQLICALNPSPCGYFDGDLSSARASPDQISRYLGKLSGPLLDRIDMQVDVPRQPDVLRQQHEQQEPLSPTWRGWVAEARACQLERQGCLNSELKPAQLAEFCRLSDDDHVFLVAAIEQFSLSHRAYHRLLRLARTIADLDDSDAIQRKHLAEALSFRALDRILQQLHKL

SEQ ID NO: 5713 - protein, 364 aa, synthetic construct
  REGION 1..364: note = TnsF-Tn7 System Protein
MVYTNGRAAGNSAVRGPWPARIKPLENESLSSWLVRASLANHSTPSNIANYIWPGWRAWTRDIDRELSKSQFASLSVVSTLTPEEVQNLTLRPIIQRITGKTKLNTATAWKWVIQRSTRNKNTNRSTQFCPLCLQADPKPYLRLHWRLSFITVCPKHNVNLLDSCPHCGESIEIHKINRGKLSSCAHCRWSITDVTPVAANREVLSLTEQLVDDMHSAKSDRFELLAFVTALLRRLPKLQDKIIDPFLMNVTENAATVRVDEFSGISFDWLNSDDRRLLLTAAAPLMNLQPKGLAFSLLNSGLSIGLLRSMVPNVPTLLEPYFPEGNPTQRSPPRHSKQSIPKPTPKRLVQRRWQAFLKKHGLS

SEQ ID NO: 5714 - protein, 458 aa, synthetic construct; identical to SEQ ID NO: 5706
  REGION 1..458: note = TnsF-Tn7 System Protein

SEQ ID NO: 5715 - protein, 668 aa, synthetic construct
  REGION 1..668: note = TnsF-Tn7 System Protein
MKIKPLRSVFVNNRAEQLPDDVWKHFVLPIHFEKIDLGEDAKSVLIAGGRGCGKTMFIRYYCHATLFSKDRGTVADTSLSHIGIYWKPDVKICNFIARPGWIKDDLKDSAFQHLAALEILSDFCRSLKSIEHADFVDGSIAIGNINVPDAARVYFDDNVRTYNDLDECINRKLVEMDMWMHNPERPKPTFLNFAPILERLCHGLSAAETRFGKIFYRIFIDEFENLHKSQQKLINDHIKHPSKYFCINIATRRHAKIYSETSGFERVVETHDYRKVDLEHEFLTQTGKSAFSLLASEVLLMRLARAGYELEGAPSPESLMDVKNLANRKSIEYQKRVKSLAAKMFPTLSYQEIARLVLDDKSLRFRLEKLIKRGLKVNHANTKFRVEDFINENVPDSTVVCACLLNRKRSNAADLHHELDSAAKGKASKLSSESDWVSGNLVGVLFYLYLGLPKRPCLLYSGFDRFCQIARSNLRYFQELCHQSFSIYESENFKDNIKINDLQVDQSIQAEAAKITSGKMLTTVGDFGVDLYNVVRRLGRIFQLSHKRPSQSEPEITHFSISGSFSDEKQNKIDELIHRAITWSVFYESKDTKNKGPSTGENSDLVPNPIFMPYFGVSYRKKRKLSLSASEFLTIVEADEESFNKLWRTFQQRWDVPSDADQQQRDLF

SEQ ID NO: 5716 - protein, 668 aa, synthetic construct; identical to SEQ ID NO: 5715
  REGION 1..668: note = TnsF-Tn7 System Protein

SEQ ID NO: 5717 - protein, 296 aa, synthetic construct
  REGION 1..296: note = TnsF-Tn7 System Protein
MDEFKHLAPQFREVAAQSDDKRIAFIKQKRWLNYPVADRILNIFAEFLNHPKQARMPSVLFIGDSNNGKTSMIERFVHLHGQSRTCVETELLIKPIVSIELSGPNARDLYFTILQEFWAPVKPTESKTNLRKLAIDHLLSSKTKMLIIDEFHTLKHGTAVARSEILAEMKRLSNKLRIPILASGIPDAAALIREDAQYQSRFSVVRLPLWTKGKDFLSLLKTFEVMLPLRKPSNLTSREIGSRILEISKGNLGNIHGLLQICAIEAITTGVEQIDLSIVESFSWYTPTEGPREIQL

SEQ ID NO: 5718 - protein, 296 aa, synthetic construct; identical to SEQ ID NO: 5717
  REGION 1..296: note = TnsF-Tn7 System Protein

SEQ ID NO: 5719 - protein, 843 aa, synthetic construct
  REGION 1..843: note = TnsF-Tn7 System Protein
MTDPIAVIVDVVGRIEPEMAPESVAAAARNVVTSRAGRRKLAKALEDNPSLLTSGRTEGPPMVDRLIHLLRDRGAVGVVQPCCAGCGKPARAMRAHNDDRLRICVTCNNKALGTFAPRPCAVCRRNVIPRFYDRHRQPLCGKCPPDPGVDHLEVICDQIMMVSPGSDRDQIRAVIGSTVRQTARRRQIAWALQDRPSLLVGEAADGSLSIRRLIAALTEHGVTGLVNPACPFCTMIRPLKALREGRPCCDSCSQAARATACVRCHAVKAVSTRTHAAEPLCWACSLQEESNKETCSSCGQFTAIATHRGERAVCFSCRTTPSATCSVCGLHKPCTGAGTPTPRCLNCAHRARSAQCVRCGKVHPIAGRDAHGNELCGNCAKRREPCCRCGRRRPVEGRVLGEPVCWTCIKTEPSYFRACSECATVSRLRHHGLCDICAAPRALDAALSAPDGNMRPELMMVRHALATSNPATLLDWLHRSTTKPMLAMLAAGEGPVTHRTLDQLVPAGPARYLRQVLVARKALPEYDRHLNDLERWFDDKLREVDDPGERRALRGYLTWSHLRRLRKATTPTTPHAAASIRGEIKSAIKLLGWLRARGRTLHTCTQSDIDHWCMQGGRMPYRARLFLAWCTQRGHTGAVQIPVASGIEARTGFDCVDTRWQLARRLLHDDTIAVADRVAGLLVLLYGQNASKIARLRTDDVACSDEHVSLLLGRCPIELPTPLDKLVLDLAATRRGKASLGHTDNHNWLFPGGLPAQAIHPAALARRLAALGVSVRTARNTALMDNASSMPTKLLSDLLGLSTTGATRWSALASPSTDTYAADLVRRRTPDPTSGPQAAAPEK

SEQ ID NO: 5720 - protein, 843 aa, synthetic construct; identical to SEQ ID NO: 5719
  REGION 1..843: note = TnsF-Tn7 System Protein

SEQ ID NO: 5721 - protein, 1102 aa, synthetic construct
  REGION 1..1102: note = TnsF-Tn7 System Protein
MTASLVALKLIPRHGADPTHRVFFQREVDALGRLTHSNIVSLLDYGEDDGEDAFFLVFEWYEKNLLESLPPLDDFGWDDFIEHWGMPLIDALAYAHERDVVHRDVKPANVLVGDDLTPRLADFGISKLRNQIAPGVTVAEFFSRPFAPPDLIGLSSASRDVWGFAATAMRCLTSGDFSDYPDLETALEDIDVPRDVLDLLRRCTDRDPEARPLNAIVLRAQLREIQEKRRRKWVQHQVAELVFREGVDARLVKPPLNRDRDVVERALVQEFGGGSHLARVVDPNTRKTYADTLDLVGNGRRLRLVVLPDQPTFLVSKVNNIDESNLEVIRRRAWPVVEEVKWTSIRQPAPVARQALEIILAAVDEHYRRLDDERQLQDENRLFDKWLDLLAAKEDLERGRSTPLRYTSAEVSGRRVRFHLAEAPESDILGEERVCRVGNAAPAGGSGVVVEQDDRGLTLAYPSKVEKIPPRGELVLDIGAAKVALRRQKEAVVNVRSGVSVRPQLRHLLLNPMGISAPTVSPTPEWFNPGLDEGKKAAVARALDSRDFFLLEGPPGTGKTSFITELVRQELARKPNARILLVSQTHVAVDNALVRLADVGLTNLVRLGKLNDDRVALQARKHLLDEQMPIWLNQIRRRAERQVEVLARESSVDLKHVQGAVSILELQAALTDKDRITARLLEVERASPAAASRPDLGDDEAASQFAALNADLQRLSERIRRLRDHANVVLGGDLVLPEDLSHVGARDAFDAIIGGDQKLKDLVGLLRLQAEWFQRIESSRDLEAVLLRQARVVAGTCIGFLSHPAIRELEFDLCILDEASKATATETLVPLARSRRWVLVGDPSQLPPMQEEVLDHPALMTQHGLERADVEHSLFEHLLEHAPESARHKLTRQYRMHPGIGDLVSACFYDNQLQSHTTHELPGWDRLYKPVTWLDTGSFDQRREKRSGTSLVNRLEVRVIKEAIASLRRSVEGNLVRVDGEEPLRILILTAYRKQMEELRRVVAGPGSSLMEIEVNTVDAVQGREADVTFYSVVRSNDRGDLGFLGERHWRRINVALSRSRYGLVIVGDAPFCQAKAGPLGRVLDYMRKHPDTCRIGSAANA

SEQ ID NO: 5722 - protein, 1102 aa, synthetic construct; identical to SEQ ID NO: 5721
  REGION 1..1102: note = TnsF-Tn7 System Protein

SEQ ID NO: 5723 - protein, 344 aa, synthetic construct
  REGION 1..344: note = TnsF-Tn7 System Protein
MPYLTDMFHEQNRAPTDVVAPPLRPVGAFDPTALTDRLGSRIVGQRNAIDAVVRAVSLASVGANDPSRPLANILLTGPTGVGKTELVRQVAAALRSGPDDMCRIDMNALAQEHYAASFSGAPPGYAGSKESFTLFDRGAIEGDPYTPGIVLFDEVEKADTTVLRALLQILDHGVLQLANGQQTISFRNSYVFLTSNLGSVELAARRRTLWGRLGRRHPPDDEKVVRRAVERFFDPEFFNRLDETVVLNGLDDATAREVAGLEIDVVARRLARRSISVEIGPDVVALLCGQGFDPVYGARGLRRTVRTVLADPIAAAVLEHRPVGSEPLHLRTRVTAGRVRVTRS

SEQ ID NO: 5724 - protein, 344 aa, synthetic construct; identical to SEQ ID NO: 5723
  REGION 1..344: note = TnsF-Tn7 System Protein

SEQ ID NO: 5725 - protein, 340 aa, synthetic construct
  REGION 1..340: note = TnsF-Tn7 System Protein
MLEGWEAQQVGGRGLRRTTVRDRRGVVQRFLDYTNEYPWHWTAQHLDEWMLELVSQRNRVRSTIRNYQYAVKAFCDYLTRPEYHWVTECERRFGTHPVQICQEWNTLAHLVDYEGNPDRRPMTRQELQRFFDYADDQVDVAVRRHRKGALSAYRDATLFKVIYAYGLRCSEAAKLDVSDWYRNPQAPELGRFGKLEVRWGKASKGSPPKRRTVHTVMPWIAEVVEDYLDNVRPRYGLGDHPALWLTERGGRVTPRHIEQRFADYRTALKMDSALVPHCLRHSHVTHQIEDGVDARFVQEQVGHRFASTTAIYTGVSGDFMNTMMNRALTKAFEMEETEAR

SEQ ID NO: 5726 - protein, 112 aa, synthetic construct
  REGION 1..112: note = TnsF-Tn7 System Protein
MTAKLDYRWNLRELMARQDMYLTTHLRPKLAERGIHLSDSQVYRLVVDTPERLSLKTLVALIDILGCSMEELIEPVATRQQPRKRKAAGDSNTDGKLGSLRPKRARIVSDDQ

SEQ ID NO: 5727 - protein, 536 aa, synthetic construct
  REGION 1..536: note = TnsF-Tn7 System Protein
MSSSPGYVRPRTPLRAVRQRLVAALQEAAGPGLTAEAAQNLLKQARAWSSAARQLDNHLAEHPDAFIAPQPDCPLALPKLLKLLTANGFGDKVVLLGCARCGRTELPLLRLAPEGRCCPRCLRRTEQRPCARCGAIGNIAARRAEGSICHKCYRREPERQLECAGCGRFRDPVYRAEDGSVLCRACYTQPLRACVHCGQLQPTRKITDKGPVCRRCYTPEPRLCGICGEMRPIQRRGDDQGNPEICQRCYRFMGDCANCGKHSHGGHYRGGPFLCTTCWPRPARLCAICGKQKKITVTWPLGEVCNSCYCARLIHPAPCAECGTTRILVCVNHFGNVCTRCGGVDLDFTCKVCGEEGPGFHDGRCERCFVAMKIDALLSDENGTPIEALRPLGEALATANPRTVKTWLTTKTASRLLADLIARHTEFTHAELDKLPQNGHTKHLRELLVTTGILPRRKEALAQLQIWTERTLPALPAHQQRLIRPYADWHVLRRARRKAARGKPYRQGADLAARQAIGCAIKFLTWLDTVGTPSRS

SEQ ID NO: 5728 - protein, 230 aa, synthetic construct
  REGION 1..230: note = TnsF-Tn7 System Protein
MRRDTSAFLAWLKQRHIATGINAPRPKCGLPQRFVDQDDHEEQLRRCLTDDSLPLDVRIVGALVRLYAMPLVRIVELTTDRFHRDETDAYLVIDENAVILPPSLATLIEEQIRNGGLANIIRTPTPDQPTYLLPGRPPSRPRNTQTFSLRLKQYGLPTIGARNTAMLTNIIDLDAVVVADLLGLHPKTAHRWAQYAQTSWAAYLQAREPEDIDTTIRPGSSPDLSELLKE

SEQ ID NO: 5729 - protein, 536 aa, synthetic construct; identical to SEQ ID NO: 5727
  REGION 1..536: note = TnsF-Tn7 System Protein

SEQ ID NO: 5730 - protein, 108 aa, synthetic construct
  REGION 1..108: note = TnsF-Tn7 System Protein
MNKKMGYRWRLRDLMADQQMFQTSNLVPLLAERGITLSREQVYRLVTQPPQRMSMDVLVALCDILGCTPNDLIEPQVVNQQISKTAGERGSTTPISPRRTVIRRPGRQ

SEQ ID NO: 5731 - protein, 518 aa, synthetic construct
  REGION 1..518: note = TnsF-Tn7 System Protein
MSDPGRPATGGNGSARPPTLENFAPQNKRGRPRSAGSHLCDRCQQHVAKIRVRWPDGAVCGACFTQATHTYGTCPDCREDRMLPGRSPATGEPICRDCAGIATDLSCTRCEREAERFRAGLCVRCALADDLTAVLKPGEDLRLHRLISLLTETGRPESIYTYMRPGTKARQLLESIGNRTLALTHEAFDALPRSAAAEHLRALLVHHRMMTARGNENLARFEQWIAARIDALPDDGTSRLIERFATWHHLKRVRARAADPETNLETVTHAAKQDITEAGKFLLWLRQHHNAGADDLQQSHVDDYLSSGPSTRKAVRNFVRWLNRQQSGRPSGLDAPFRSAQSIPMITQTQRRELVRNCLEHHHVVRSTRLAGLILLLWAHPLNKIVMLRRDHLTTTPEGMLIKLGMTPAAVPAALTEMFWQQSQNPGNRNTANTGTDWLFPGTRAGRHLHPGTLAERLRVLGIDAQRARNATLRDLTQEVDARTLMDLLGYSPGIIAQHAARAAVPMSDYVALKNSGR

SEQ ID NO: 5732 - protein, 229 aa, synthetic construct
  REGION 1..229: note = TnsF-Tn7 System Protein
MRTPEITPAGAVPLVLRSGTGLLNEAETVWTEMLQGWAAQQFARNLSAGTVEARRGTVVRFREFAGAYPWEWTAGTVDEFFLELRALKGAARSTVLGYQNALRMFLEYLTDPAYGWGKQCWERFGDHPAQVFHEWNTVRHAQDEVGAPGKRPYTRDELEDLFDCADERVLRIRRSRAKGWIPAFRTATIMKVAYAWGLRRNAGLDRNPFPRPLCLSMACRCRHGRRARP

SEQ ID NO: 5733 - protein, 340 aa, synthetic construct
  REGION 1..340: note = TnsF-Tn7 System Protein
MLDGWRNQQLSRNLQFDTIAQRIRYVSRFVEHMNEFPWNWTPAHVEEYFGDLRSIKHLAHSSVRAQQSALRAFTSYVANPDYGWDRHCEKLFGTHPAQVFFEWNTAAHVQEFEGRPAKRPFTRRELQLLFDHADDEVERAAASGNKGWQAAYRDAVMLKAAYSYGLRFNEVRHLQVVDFATNPHARRFGKFGVCKVRFGKSRRASPPKPRSVLTVFDWTPGIFEDWLANGRGTLDTLDLFPSERGGLISESTLLRRLRRYVAELGIPADGLDLHSLRRSYATHLLEDGWDPRFVQFQMGHEHASTTGIYQFVSDDFRTKTLREGLERTLDEALGHPEGEW

SEQ ID NO: 5734 - protein, 303 aa, synthetic construct
  REGION 1..303: note = TnsF-Tn7 System Protein
MAQDKNVLFAPFGGQAPDPDAFLGMVLDGWGRQQRAKDFASATIRTRRSVVMSLVDFSGRYPWEWTLGDADDFFSHARAVRNLSHGTVRSYQGHIKLFCEYACDPHYDWCEQSAKLFGQVFAQIVTELNRVTHAQPSEARPAKRPFTQRELQDLFDLADLEVERILDSGRKGALAAWRDAIAFKTAYGWGLRANELRHLQVVDFSRNARAPYLGDHGVLRVRWGKSHRGSAKKPRSVLTVWPWSVEMIQDWIRNGLPRYGHPVTDLFPTSGGSIVGESHLIGRLRDLVDELGFPPGELVKSSV

SEQ ID NO: 5735 - protein, 99 aa, synthetic construct
  REGION 1..99: note = TnsF-Tn7 System Protein
MMAARGLHNTTDLIPLLAERGIVLSRPQVYRLVNQKPERVALQLIAAICDIFSCGPEDLITVTAADVKARRTGTASSPNVVDLNRAARPRRARIIDDDH

SEQ ID NO: 5736 - protein, 113 aa, synthetic construct
  REGION 1..113: note = TnsF-Tn7 System Protein
MSRREITYTWRVREIMARRGVHTAKDLAELLHERGITLTANAVWRIVTQEPERISFKVLVALCDALDVTPNDLIAYTATDARTVRQRRKASGDDIPDLRQYRPVRARIVEDDE

SEQ ID NO: 5737 - protein, 300 aa, synthetic construct
  REGION 1..300: note = TnsF-Tn7 System Protein
VFAMFSTEKRLGSLCGRIRVIALRAHQDSGDVCNSCYKGPLALCRVCGRERPCNFVSSGRPVCVSCSPRPKVLCVHCGKLSPPAVHWPEGAVCKPCYRGALSRRGICETCRSERRLVDPPGPNARLCADCSGTQGLLRCRECNAEECPYKDGLCIRCALREQTRLLIDNIDGPLAPIYRAIISNPQPYSAYNWVRQSASAKIMAEISNGTLALSHEALDSYPKRVAANLVRQILVANGVLMRRDDRLSELETWINSKLDKVSSSKDQHLLRSYAIWWVLRRNRERGALSNRSTTSTGHSK

SEQ ID NO: 5738 - protein, 300 aa, synthetic construct; identical to SEQ ID NO: 5737
  REGION 1..300: note = TnsF-Tn7 System Protein

SEQ ID NO: 5739 - protein, 233 aa, synthetic construct
  REGION 1..233: note = TnsF-Tn7 System Protein
MSVHVSGYEGRPARRPFTRGELQALFDVADACVEEAATSPRKGWLGAFRDATLLKVIYGWGLRRREAAMLDVSDFGINPAAPELGEFGICHVRFAKAMRGSPPKRRSVATVWPWTSEVVGQYVKEIRPLHGDPARGSALWLTERGERISLRSIDDRFATWRRLAELPPELSVHSLRHSYVSHLIEDGVDPLFVQHQVGHSWASTTAIYTTVGSDHMNRMLRGALDRAFRDKEY

SEQ ID NO: 5740 - protein, 114 aa, synthetic construct
  REGION 1..114: note = TnsF-Tn7 System Protein
MSTKRIAPVSFRWHLRTVLAQKGIFVTSELVPLLASRGVTLSREQVYRLVVKTPQRLSLMTLSALCDILECSPSDLIEPLSGTESGPADTPAPGRAQISAIHPIKAKITPDPRL

SEQ ID NO: 5741 - protein, 495 aa, synthetic construct
  REGION 1..495: note = TnsF-Tn7 System Protein
MARPRKPGNPERWPLPCARCKGHYPVSAKWPDGDICGYCYQQAKRTRGTCACGHEGVLPGRLDNAPACRPCSGVKLNVDCATCGREDELYRGDRCWHCELALRVDNVLAHPETGGVRPELAPLADALKAMKRANSGVTWIQQGHVDGFLRALAAAPSISHEALDDLPGVDRTRSYVRGLMVEHDVLPARDERAIRYGQWAAAALARLQSDEHRDVIRRYVRWYHQRRMNEMTSVPDGTYLRSKQSVTVAIEFLNWLDDHTLRLDEIAQEHVDAWIADGPSTRKFLDRFLPWAVKSRLVRPDLQVPAHRRGTSPKFSKPAQDDAVERVVHTNELSARDRAAAILVIVFAQQIEDVIKLTWGDIAIVNEVVTVSLGKTTFALPSPLDGPFRELAAAPVLTAAHPRDNWVFRGYSPGRHITGSSLRISLKALFATRAARLGTLHELTKLGPVPIVADALGYSTTTIERHAIGSAAVYSEYIASIKSVGAPGRRPPEVT

SEQ ID NO: 5742 - protein, 495 aa, synthetic construct; identical to SEQ ID NO: 5741
  REGION 1..495: note = TnsF-Tn7 System Protein

SEQ ID NO: 5743 - protein, 780 aa, synthetic construct
  REGION 1..780: note = TnsF-Tn7 System Protein
MDQPADSHDVIRVQGARVNNLRDVTVEIPKRRLTVFTGVSGSGKSSLVFGTVAAESRRLIDETYSTFVQGFMPNLPRPDVDVLEGLTTAILVDQERIGANPRSTLGTVTDANAMLRSLFSRLGEPYIGGPTAFSFNIPTTKVGGVSITESGQKNVIRNQVYLGGMCPACEGRGTVSDLDLSAIIDESKSLEEGAILVPGYTADGWLVAAFKAVVPSDVPVGKLTDEQRQDLLHSEPRKVKVDKINMTYEGLIPKIRKSMFSKDPDSLQPHIKAFVERAAVFGECPTCDGTRLNESARTSKIKGKDIGDICRLQVTDVADWVRTIDDPRVAPLVGALLHLLDALTEIGLGYLSLDRPSGTLSGGEAQRTKMVRHLGSALTDVTYVFDEPTIGLHPHDIERMNKLLLELRDKGNTVLVVEHKPETISIADHVVDMGPGAGTGGGEVVFEGTYAALCGADTHTGRHLGYRAALKSSVRESTGVLEIRGASSHNLQDVDVDIPLGVLTVVTGVAGSGKSSLIHGSLAGREGVITVDQAPIKGSRRSNPATYTGLLEPIRKAFAKACGVKPALFSANSEGACPTCNGAGVIITELGFMDTVSTPCEDCGGKRFQASVLELRMGGLNIAEVLDLPVTEALAFFSAGEAKTPAAAQVLARLEDVGLGYLRLGQPLNTLSGGERQRVKLAMNMKDAGGIYILDEPTTGLHLADVDNLLRLLDRLVDAGKTVIVIEHHQAVMAHADWIVDLGPGAGHDGGRIVFEGTPSDLVAARSTVTGEHLADYVAG

SEQ ID NO: 5744 - protein, 780 aa, synthetic construct; identical to SEQ ID NO: 5743
  REGION 1..780: note = TnsF-Tn7 System Protein

SEQ ID NO: 5745 - protein, 375 aa, synthetic construct
  REGION 1..375: note = TnsF-Tn7 System Protein
MQGIPGFVPRVLRDGEVGLFRADDRVFDAMLDGWKAQMLARGLTTQTIEGRCGTLRRFQVFGGKFPWTWQAVDLDDYMAERRSGAKPISLNTLRSDSNAIAMFCSYVSSPTYGWIEFCEKTFGDVPAQISFEWNTPRHTTDDAVPPGRRAFTQKELQSIFDYMDDLVDREHAAGSKRWLPALRDSIAFKLCYAYGLRRREVSMLDVHDFGPNPHVPAYGEFGAVTIRWAKGTAGSGPRRRTVLTVPEFEWVVDLLKFWIHEGGRGLFPTAERSAALWPSERADRITLGSLGDSFAAARDAVGLPKELGLHCLRHSYITHLIEAGYDPAFVQTQAGHAYASVTSVYTSVGDDFKQKTIQKMIARRIARPEEARTDG

SEQ ID NO: 5746 - protein, 117 aa, synthetic construct
  REGION 1..117: note = TnsF-Tn7 System Protein
MAEQRRMGYRWNLRTLMAQRGLWKSTELLPLLRSRGINLSESQVYRLVTGTPERFSGRTIAALCDILDCEIGELLEVVVEVRAAKTANAPRRPEDLGVQPGNPIARRVRIVPDHEDG

SEQ ID NO: 5747 - protein, 477 aa, synthetic construct
  REGION 1..477: note = TnsF-Tn7 System Protein
MTCSRCGHGTPRARTTWPEGRICGPCYTLATHTYGICPGCGQDRLLPGLPDFPDGPTCGDCAGIPTNFHCPRCHHEGAFYRQGTCARCCLRDDLVSLLLSDHTIDPVPMKILIDALCSAQRPESILTWKRSPKVQRLLSSLATGATPITHAGLDAYDGGREVDHLRAILVQTGLLPTRDPYLAHFEQWITTKTSGLSDEIKRPITKFATWHHLRNIRRMDASASTLRGPVHNAKQEITQAIDFLTWLKEVHGRTAGTCTQQDLTAWLAGGPTTRWLIRAFIVFAHKTRINTTLEIHARPTRHSPCLTQEQRLAWLRELLADDREMLSYRVAGALLLLYAQPLVKIAALPTSTIEADEAHMTILLGQHPVPVLEPFDGLLRQHLAHRSNLRTTTTTSPWLFPGRRAGTHLHPASIMSRLRDLGINLRGARNRALTDLVVEVPPPVVADALGYTHQAAQRHADAEAAPWSRYISAKIPH

SEQ ID NO: 5748 - protein, 477 aa, synthetic construct; identical to SEQ ID NO: 5747
  REGION 1..477: note = TnsF-Tn7 System Protein

SEQ ID NO: 5749 - protein, 802 aa, synthetic construct
  REGION 1..802: note = TnsF-Tn7 System Protein
MTKAAAKSGQAPDPHAADGHDLIRVRGARENNLKDIRLELPKRRLTVFTGVSGSGKSSLVFGTIAAESQRLINETYSAFLQGFMPTLSRPEVDLLDGLTTAIVVDQQRMGSDPRSTVGTATDTGAMLRILFSRLAQPHIGSPQAFSFNVASISGAGAVTTTRAGQQVKERRSFSVTGGMCPRCEGRGSVSDFDLTALYDDNLSLNDGALTVPGYSMDGWYGRIFKGCGYFDPDKPIRTFTKRELSDLLYKKPTKIKVDGINLTYEGLIPKIQKSMLSKDREAMQPHIRAFVDRAITFGSCPECQGTRLTAEARSAKINGVSIADACAMQISDLADWVRDLDEPAFLPLLKSLGETLDSFVKIGLGYLSLNRGSGTLSGGEAQRVKMIGHLGSSLTDVTYIFDEPTIGLHPHDIQRMNELLIRLRDKGNTVLVVEHKPEVMAIADHVVDLGPGAGVHGGSICFEGSIDGLRASDTVTGRHLDDRAQLKDAVRDPTGTIEIRNANAHNLQDVDVDIPLGLLVVVTGVAGSGKSSLIEQSVAGRDGVVLVDQTPIRGSRRSNPATYTGLLDAIRKAFANENGVKPALFSANSEGACPGCNGAGVIYTDLGMMAGVASTCQECEGRRYQAAVLEYTFGGRNIADVLTMSVDEAAAFFAEGEGNLPAAHRVLVRLVDVGLGYLTVGQPLTTLSGGERQRLKLAAHLGDKGGIYVLDEPTAGLHLADIDQLLGLLDRLVDTGKSVIVIEHHQAVMARADWIIDLGPGAGHEGGRVVFEGTPADLVADRSTLTGQHLADYVHMSTRVGR

SEQ ID NO: 5750 - protein, 802 aa, synthetic construct; identical to SEQ ID NO: 5749
  REGION 1..802: note = TnsF-Tn7 System Protein

SEQ ID NO: 5751 - protein, 364 aa, synthetic construct
  REGION 1..364: note = TnsF-Tn7 System Protein
MAVDEAGRVRLVGAVPLLHPEQQIVEEMLAGWRNQQLCRNLQFATIDQRTRYVHRFIDHTGEFPWNWTPVHVEEYFGDLRSVKHLSHATLRGQQAALRAFTSYVANPDYGWDRVCERQFGTHPAQVFFEWNTAAHVQDNEGRPRRRPYSKQELQTLFDHADDEVARVASSGRKGWQQAYRDATMLKVAYSYGLRFNELRHLQTVDFATNPHARQFGAFGVCKVRYGKARRGSPHKPRSVLTVFSWTPGVIQDWVANGRGEPGTLDLFPSERGGLVGEPTLIRRLRRYIVDLGFPDGLDLHSLRRSYATHLIEDGWDPTFVQDQMGHEYASTTGIYEFVSSDFRNATLRAALQRTTQAALEGEPG

SEQ ID NO: 5752 - protein, 111 aa, synthetic construct
  REGION 1..111: note = TnsF-Tn7 System Protein
MRREVDYTWRLAELMAARGLHNTTELIPLLAERGITLSRPQVYRLVNQQPERVNLKVIAAICDIFDCGPHDLITVTAADVRARRTGTEPNNVIGLDKAARPRRARVTDDAR

SEQ ID NO: 5753 - protein, 441 aa, synthetic construct
  REGION 1..441: note = TnsF-Tn7 System Protein
MRVLVGRSSAGTNLCGPCSGAPHLDFSCRRCANPGDIYADGLCSRCVGYDRALTLLTAPDAGTVPQQLIPLLDALATVPGPSLVKWVNRSATARMIGTWVADKENISHESLDRLPQNNITREIRQTLVTIRVLAERHEPLSQQQLWVAALLDGLPAQQQRILRPYAEWHILRRARFKARRGRYVHGSTRHDRRKLRAAAHFLDWLDTIGVELARATQAHLDHWVTEHTSRAAALAPFITWTSQRRLTSALTIATPPHARPSQFLTSHDYHQQLQRCLSDNTIPLEARVVAALVRLYGLPVSRILVLTVDLFHRDGNHAYLTLNEHPVLLPPTLASLIQELIGARVPSMFQERDGPGYLLPGRPPSQPRSQNAISQTLTRYGLSTLAARNTAMIENAGQLPAVVISELFGIHITTAHQWTELAATSWTEYLAADSDTSTEQG

SEQ ID NO: 5754 - protein, 441 aa, synthetic construct; identical to SEQ ID NO: 5753
  REGION 1..441: note = TnsF-Tn7 System Protein

SEQ ID NO: 5755 - protein, 363 aa, synthetic construct
  REGION 1..363: note = TnsF-Tn7 System Protein
MATRGPRAVDIVLTDDERRELEGWARRRTTASGLAMRSRIVLAAADGGSNTEVAQRLGLNRSTVRRWRGRFVEHRCEGLLDEPRPGRPRTVDDEQIKNLITATLETTPKNATHWSTRSMAEHLDMSQSTVSRVWRAFGLAPHKQDSWKLSKDPLFTEKVRDVVGLYMNPPERALVLCVDEKTQIQALDRTQPIFPMLPGTPQRASHDYVRNGTSSLYAALDIASGKVIGSLHSRHRATEFIGFLRKIDAEVPDELDVHLVMDNASTHKTPAVKRWLTSHPRFVVHFTPTSSSWMNLVERWFAELTTKKLQRSTHRTVRALNADIRAWIETWNDNPRPYVWVKTADQILDSIAHYCTRINDSGH

SEQ ID NO: 5756 - protein, 342 aa, synthetic construct
  REGION 1..342: note = TnsF-Tn7 System Protein
MLQGWRRQQSARFLKESTVAPRLRLIRRLVEFTGSYPWQWNPADGEAFIDHLRNGEQPRSVSTARGYEVAIDMFTDFLLDSRYGWAAVCEERFGQTPQQIFHEGNSIAHRVDYEGDPRRRALTFDEVQALFDAADARPQQIAARGVKGALSAARDSAVLKMIYAFGLRRTETTRLELPDLRRNPKAPQFRDFGVTMVRYGKSSKGAPPKRRSVLLVPEMDWIVDTLDHWLTDLRPRFAPGKHPALWVTERVGRLSPRSVNEAFVAVREVAGLDQCLDVHSLRHSYVSHLLEFGYPARFLQEQVGHSHAATTAIYTHVSPEYRNKLLESALRGKLGADWDVTA

SEQ ID NO: 5757 - protein, 848 aa, synthetic construct
  REGION 1..848: note = TnsF-Tn7 System Protein
MTVPDANRPGADWVRAALQVNPFGYVGHPAPSDSFADETTYNAALLDACESLGITLLAVTDHWKASTAKGLIKDAAARGIVALPGFEANCHEAFHLLVLFEAGTDLDSITGCIGACGAPDDDPHGPGEKTFAEIVVAMGSRGAVVIPAHVNVATSGLLSRVQGKPLQKVVKHDGILALATCPAQPLLADQSAILRNAKPYERAHPLVEIYADDISHPDALHEIGATTWFKMATPSLEGLRHALRTPETRVRTTRPSEPRGTRITGMNWTGGFLNEVSIPIGSDLTALIGGRGTGKSTVIESLRFALDQPPVGQESKRDHENVVKKVLGPGTVVRVEVSTFHPAPERYIVQRTVGDPPLVIDASGTVTQQSPKDVVGDIEIFGQHELAELAGDKAMLAKLVRRLGGDAVAEQARPALVEQLRKNRLDLAEIERQQGDLETALADIPRLEEQMGRYVATDLETKLAAERVIADERATFSEYRRRVDAVENRIADFNVSALVDQIRGDITESTAGPRATELNRARTALEDLATTIEEAFATIQEAKTTSKTSVEAAASAWSAIVQPELDEHAATRRELVEEGHDPDSYLKTAEALKRLRIRAEERTVLAGRHAALARERSELLGKLAICDADIATELNAAIGATNAVTKGKVVVKPVANPDREAIKQVINDRFSTARTQIMAAIDDRDFSVRSFVDAARQGAEQLARFGVIGAQATTLVSHGEALLRELEEFNVGFAVDVCLNVAESGTDLRRLEDLSKGQRATTLLLMLLSVTTSPIVIDQPEDDLDNRFVYRGVVPHLRSLKGERQILVSTHNANVPVLGDVKRPGFVGGSRICEGWRAWQHHGSTALS

SEQ ID NO: 5758 - protein, 848 aa, synthetic construct; identical to SEQ ID NO: 5757
  REGION 1..848: note = TnsF-Tn7 System Protein

SEQ ID NO: 5759 - protein, 108 aa, synthetic construct
  REGION 1..108: note = TnsF-Tn7 System Protein
MIKKMGYQWRLRHLMAERDLFHTSDLVPLLAEHGIRLSREQVYRLVTQPPQRLNMDVLVALCDILDCTPNDLILPEVVHQQVRKTVGGVTASSEITARRSVIRRPGQQ

SEQ ID NO: 5760 - protein, 496 aa, synthetic construct
  REGION 1..496: note = TnsF-Tn7 System Protein
MRPSYKNAGQYERWHVRDCVRCGRRAGKAANWEGSICRTCYAKAVRCHGHCPGCGSDRLLPGRRSGDAAPICRDCAGITRDFFCDSCGFEGELHGGRLCTRCTLARQLRELLDDGTGQIHPQLALLVDAVLGMPEPLTGLKWLRSTGVRGLLADLAAGRVPITHDALKELPNQRAVAYLRDLLMSCGVLPTVDKQLLHAEALLHRKLTELADSPHFRMLRQFTLWHQLPRLRRRARRGPVVDAGRYYLGAVEEAARFLAWLDERGTQLGECAQADVDLWHAQALAHRRQLARPFLIWAKSTGRMPKHGIPTTTAGAGKPITQTRRLALLRRALTDPRPPLRSRVAAALMLLYGQPVARLVRLTIDDVVNDDGQVLIRLGTPPLPVPEPLAGMLPELVDNRQNMTTVNPESQWLFPDRRAGQPVHFSTLLGHLRQDLGLPAQATKSATLRQLVLQAPAPVLADALGFSAKHMTRVWGEAGGSWTTYSTRETGHHSTT

SEQ ID NO: 5761 - protein, 496 aa, synthetic construct; identical to SEQ ID NO: 5760
  REGION 1..496: note = TnsF-Tn7 System Protein

SEQ ID NO: 5762 - protein, 378 aa, synthetic construct
  REGION 1..378: note = TnsF-Tn7 System Protein
MKGGALGVDGKVPGSAALHLVDGLSLLRPEEQVLTAMLDGWRNQQLARNLAFSTIGGRERGVRAFADYADAFPWHWKAQHVDEWLGDLRAVRNAKRSTLRNYQEAVQLFCAYLIDPAYQWATVCEQRFGTHPVQVVHEWNTAEHIDEAESDSGKRAFTRKELIALFDYADEQVVRIREAGRKGWLPAFRDAALLKTAYAFGLRRNEIRMLDTADFGRNPDGPEFGEYGAVYVRHGKAKKGSTPKRRSVLAIWDWSTEVLAEWIEEYRPLFPTAGSPACWPSERGPRIGLSTLNTRLAAYRDELGLDPALDFHSLRRSHITHQVEDGFDARFVQEQAGHEHASTTSIYTCVSSDYRTRTLRRVLDTTVAAALKQPGRKR

SEQ ID NO: 5763 - protein, 108 aa, synthetic construct
  REGION 1..108: note = TnsF-Tn7 System Protein
MKRRVSYQWRLRETMAAAGMFAANDLEPHLHDRGIKLSSVQVWRLVTQTPERLSLPVLAALCDIFDCTPADLIATKAENQARKAVAGDKVVDMNTTIRPKRARIRVEE

SEQ ID NO: 5764 - protein, 493 aa, synthetic construct
  REGION 1..493: note = TnsF-Tn7 System Protein
MTNGAVECSRCHRMANRLRVYWPGDQLCNSCFYTAMRTHGLCPTCGHDGVLPGRRNRADPRPVCMTCAGIPGNFTCTICQCEGEMYRRGQCARCALRDDLCKILLHHPADLTAMQTLIEVLCGVDRPERILTWKRNIEVLQLLGGITSGAIPLTHDGLTAAGRGKHVSHLRSILEHHGLLPPRDEHLARFELWLAAKLDAIDSPTVRTPVEQFASWHHLRRLRSESKPGQSSDGPKRSAKQEITETIRFLTWLEHTHQRTIADCTQQDVDEYLTSGPTTRHLIRTFFIWAKKSKLNVAVLIGFREAKTAPTITHDQRLAWLKELLTGDSETLPYRIAGILLLLYAQPLTKIAALQSTAISYADGETRIALGKEPISVPEPFASQLNYHRYNRPNLRTAGGAIGTPWLFPSSRPGRHIDPQAIMQRLRALGVNMLGSRNTALQGTVSEIPAPLVAEMFGYSDQVTQRHAALAGTTWANYATARNVANSKKEADW

SEQ ID NO: 5765 - protein, 493 aa, synthetic construct; identical to SEQ ID NO: 5764
  REGION 1..493: note = TnsF-Tn7 System Protein

SEQ ID NO: 5766 - protein, 305 aa, synthetic construct
  REGION 1..305: note = TnsF-Tn7 System Protein
MVVNDFGELNVDASLVAGQIDEPASIAGGCICCLPDDGGLDEALAKLADPARRLDAILVEASGLADPVAIARIIGFSKLSGVRPGGLVDVIDAVHHFDTVDRSQLPPARYGAASLVVVNKLDQVPEDDRRALIARVEHRVAQRNPRVHVVGTTAGRIDPALLFDPLGTAEEEAGQLSFRELLDDFDHDHDHVHAHSVSVSSAGCVDPDALCDLLEDPPSGVFRMKGVVAVRHGSSVRTYVANLVGSAIHVGKAPPRAVANCLVAIGMEFDVAAVRARLDLTLQPAAGPAPAAGLRRLQRYLRLSV

SEQ ID NO: 5767 - protein, 305 aa, synthetic construct; identical to SEQ ID NO: 5766
  REGION 1..305: note = TnsF-Tn7 System Protein

SEQ ID NO: 5768 - protein, 325 aa, synthetic construct
  REGION 1..325: note = TnsF-Tn7 System Protein
MAATPPQIRLWDDNPSTLDLLGFDAVVEPIVAAVRERNIHPLTLSVQSPWGGGKSTILKLIEAEFKDDDTCFVVSTNPWAYDDQVDVKGTLISEILHGIESQIPDPSIKAKVAEKAKELLGRISWSRAAVAIAKGALTFQVDPKQIAEIFQPKDPIGGPDSMAGFNDAYKELLALIPNVERVVILVDDLDRCLPDAVTATLEAIKLFLSTEKMVFVLAADQDMVRDAISVSLDGARRGDIFAKRYLEKIVQLPIALPRLSATDAEAYIGLLIAGRSMKETDLRVLAAHVRARRNAHQTPLLHDFEALAVKPAEDDLALATQLAEG

SEQ ID NO: 5769 - protein, 325 aa, synthetic construct; identical to SEQ ID NO: 5768
  REGION 1..325: note = TnsF-Tn7 System Protein

SEQ ID NO: 5770 - protein, 360 aa, synthetic construct
  REGION 1..360: note = TnsF-Tn7 System Protein
MFLVGSVPLLHPEVQTVEEMLEGWRNQQLCRNLDHDTIDGRIGLVRRFIGHTNEFPWSWTPAIVEEFFADLRGIKGRRQSTIRGYQNGLRLFCSYIADPDYGWDRVCEQRFGTHPAQVFFAWNTAIHVQDNEQDPEKRPFTKQELQDFFDHADDQVTVIAATKKKGWLPAYRDAVMFKVAYSYGVRFNELRHLQTVDFSRNPHAPEFGRYGVVKVRYGKAKKGSPPKRRTVLTVFDWTPEIIADWLTHGQPYLDDGIDLFPSERGALVAERTLLRRFRRYCNDLELSAGLDLHSFRRSYITHLIEDGWDAKFVQDQAGHDYASTTSLYTGVSSDFRTRTLRRVLDRTIKDALSFGEEETS

SEQ ID NO: 5771 - protein, 206 aa, synthetic construct
  REGION 1..206: note = TnsF-Tn7 System Protein
MSTATKVTNTLRRQRGMTPQAAQAAVDSACRRLRLPTVRAVIDEAVKVAEREQLTYHGFLAELLLAECDDRDRRSTLRRVAAAGFPRQKWLGDFDFDANPNINAATVHTVAQGDWIRRGDPLCLIGDSGTGKSHLLIGVGTAAAEQGFRVRYTLATKLVNELVEAADEKQLARTIARYGRVDLYVSTNSATWNSTAGARVAVPSTH

SEQ ID NO: 5772 - protein, 206 aa, synthetic construct; identical to SEQ ID NO: 5771
  REGION 1..206: note = TnsF-Tn7 System Protein

SEQ ID NO: 5773 - protein, 121 aa, synthetic construct
  REGION 1..121: note = TnsF-Tn7 System Protein
MKREVDYTWRLAELMAAHGMHNSTDLIPRLAERGVQLSRPQVYRIVHQRPERVALQLMAALCDILGCGVEDLVTVTATDVRKKKTASGTVAPPNVVELNKSVRPRRARVVTDDKLMPPLDL

SEQ ID NO: 5774 - protein, 693 aa, synthetic construct
  REGION 1..693: note = TnsF-Tn7 System Protein
MAMFRLLTELESAGCTEVVVPLCASCEKRRVLRFTDGEGARICQMCKARATALPCSRCGKTAPVNARDTGGVICRICYGSDPARHEACTICGRARRVANRGPDGKPFCANCYSRPKRKCVQCGDMRSVKANTTAGPTCSRCYVHPRRLCGSCGCIRRIKTRARDGQPDLCSNCDPGPVMTCSACRRERPCLRATTDTPVCRSCRDRPQRTCARCGRQRPTTAWWPIGPVCDGCYRYICVNPAECVTCGERRPLIGIDEQQRQVCGPCVGVDLTYPCSTCGNAGDIYRNGECARCVLRDQLHEQFGPTEGTPLRPLISALAAVETPRSVLLWMRRENSGATMLRDLLISGYSVTHELLDTFPGRQAAVHLRQLLVHVAVLPERDEHVAGMERWLQNYLTTVAAQRRSILQPYAQWVVLRRVRHQASTRGNTTSTIKYARTQVSVAHTFLAWIEGQGLSLAEVRQPHLDQWLAAGASTRCNLRDFLRWARRCRLIADLQVPWRPDGEPSNFLDEDEHLALLHRCVHDSGLPLDVRSAGALTLLYGMPVTRIAQLVHEDIQVREGNAYIQIGRHPLLLPPALARLLNEQMEKATSRSLVGRATPRAASWIFPGALAGRPIDGPKLSGRLLRHGIDVRASRNTALMALASDLPAPILSEMLGIHINTAVEWVGHVKRDWAAYLAARGGDDDLDIFRA

SEQ ID NO: 5775 - protein, 693 aa, synthetic construct; identical to SEQ ID NO: 5774
  REGION 1..693: note = TnsF-Tn7 System Protein

SEQ ID NO: 5776 - protein, 342 aa, synthetic construct
  REGION 1..342: note = TnsF-Tn7 System Protein
MLDGWATQQRARFLKADTIKARIDLVRRFAHFTGQYPWQWQAQEAEEFISHLRSGTQPVMVSTARGYQNGLRLFMEYVTDARYSWPAVCQERFDAVPIQILHEWNTVAHTSEYEGRPGRRPLTYDEVQSLLDAADARVEEIRGRRRKGALAAMRDATLLKTVYAYGLRRREAWGLDVVDLRRNPKATDYGTYGALFVRYGKSSRGGQPKRRTVLTVPEMDWIVPVLQQWVSEARPLFSPGSHPAFWVTERRGRLSSRGINEAFEQARNDAGLPEALDLHCLRHSYVTHLVEFGYPEKFVQDQVGHSYASTTAIYTGVSDEFRNRLVQQSLQQRHASLWESQK

SEQ ID NO: 5777 - protein, 110 aa, synthetic construct
  REGION 1..110: note = TnsF-Tn7 System Protein
MIKKMGYNWHLRQIMAKRGMFQTSDLVPLLAERGVHLSREQVYRLVTQPPQRLSMDTLAALCDILDCGVQELIEVTTAEQSVRKTGTGPSAGPSAPPQPRRASIRRPDFS

SEQ ID NO: 5778 - protein, 675 aa, synthetic construct
  REGION 1..675: note = TnsF-Tn7 System Protein
MLVERLHRSCDVFMTLTVAEVKELVERYVPTSNSQTRLRHYVQGRPDFAVSGDAFMPRVAQRFLHDLTRDGLVQVVLPRCLSCGDARLLTKTLADGRRVCGRCEGAAGRRECAGCGRHRTIMARAAEGGICSSCWRHRPEARKICSRCNRPGLIQERTIDGPVCARCATGTVLPCSSCGQTAKITGYLLGGAHCLRCYNQIRRVPLPCRTCGQSRIIAYLDTAGQPCCASCAGVPARFGCRDCGGETDLIGRLCAPCAVRVRSLTLITRDDGTINEVFQPLRDYLLASHRSHTLAAWTTRSASATLIRDFVNDRLALNHDSLDRATPRRAVDHVRDLLVAVGLLPGRDERLVRAERRVDAAIAAASAEHRPLLRRYATWEIINDLRRRAARSPLSISAASRARQKIEAADLFLRHLAHSNTDLGSVRQAQLEQFVLDEHMDQNALSAFLRWAHGARLLGDVELVIRQPATPSPGHTQTELLAAITTLCEDESIPLRARVAGLLVALFGQRLTHLVTLTRAQIDVSELHNSVSIRLGDEPVRLPPVLAQLTLELRDAPRPWPEEPEQGWLFPSMKAGQPVQPSTLGSELKRHSFSATRLRSAARFNLAGKIPLGPLEELTGIGAQSLNRWATTAQRDWSAYIPLRTELQSEPMDAPHGVAEGTAEPEGRAQERDRP

SEQ ID NO: 5779 - protein, 675 aa, synthetic construct; identical to SEQ ID NO: 5778
  REGION 1..675: note = TnsF-Tn7 System Protein

SEQ ID NO: 5780 - protein, 351 aa, synthetic construct
  REGION 1..351: note = TnsF-Tn7 System Protein
MIAPEQQTFQEMLTGWERQMRARGLDVVTVSSRLGLIRRLRLFLDDYPWNWRAADVEEFTASLLSGPKPLAKSTIRSYHLMIRGFSAFITDPRYDWPVVCEERFGTHPVQVCHDWNTHAHVAEFEARPARRPFSYDELEVFFAHVDAEIDRITEQGKKGALGALRDAQMLKTIYAFGLRRNEARMLDVTDLHPNPEAPAWGTYGMVHVRHGKSRRGGPARRRSVLAVPEFEWAIHGLRQWVEQARPLYGETDSSAVWLTERRARVSVRHLDSRFAVLREGAGLDPALTLHSLRHSYVTHLIEFGYPERFVQEQVGHAYSSTTALYTSVSNDYKNRILARALANVYQEESTR

SEQ ID NO: 5781 - protein, 110 aa, synthetic construct
  REGION 1..110: note = TnsF-Tn7 System Protein
MTAIEMTWNLRQLMAQKGLFKTTDLVPLLSERGVQLSREQIYRLVTSKPARLNMDVFGALCDILDCSPAELVTFTKTGTVTQVAATAAGRRKGPSIGDLRPIPATIRRAD

SEQ ID NO: 5782 - protein, 391 aa, synthetic construct
  REGION 1..391: note = TnsF-Tn7 System Protein
MSGPDGVVRESLEPLATAIVAMPRANSGVTWIRANPKVRELLGALGDGSVDPTHDALDALPRTRTVEYLRALMVEHSVLPARDRLLATYEQWLHGKLTTTVDDDSRKIIERFGRWHHLRKLREHAATGPVDTGPFLRAKQSTTVAISFLNWLNERGTTLADCSQHDVDAWYASGPSTRQHAERFLYWARSNKLTPQLSIPRHTTGKYELVGEDERLHIIRALLLHDDLPAVHRIAGCLLTLYGQSIARIVALTMDDVRATISAVSVKLADTWVDLPEPISHLLRDHLTNRPNTSTASNAASRWLFPGAMPGEHLNRQTVIEALRHAGIPTRAVRNSTWQQLVRQAPPRVLADALGISAITAMQHAERSGADWTRYAPVRQSSCRGQTASRH

SEQ ID NO: 5783 - protein, 391 aa, synthetic construct; identical to SEQ ID NO: 5782
  REGION 1..391: note = TnsF-Tn7 System Protein

SEQ ID NO: 5784 - protein, 376 aa, synthetic construct
  REGION 1..376: note = TnsF-Tn7 System Protein
MDERWNVPGGAPELFLAGTSPLLRPDEQVFAAMVAGWRDQQLSRNLATETIKIRLELVHRFQRFTNEYPWHWRPLDVDEFFADLRGEGRARSTLRSYQNALRLFCDYAADPRYQWTAVCENLFDTHPAQACFEWNTATHSGDYEGRPARRALTKTELQDLFDYADDQVQIARHSGHKGWLSAMRDATAMKTAYAWGLRRQELAMLDTTDFGTNPHAAEFGGHGVLYVRWGKANKGGTPKRRSVLTVFPWSVRVMTQWIEHCHDLNTRTPRSTALWPSERSPRVSKEKLGARFAGYRRALGLPDELTLHCLRHSYVTHLIEDGYDPLFVQQQVGHSHASTTALYTSVSSDFRTRTLRTVLDNSIERALALPDPGAAT

SEQ ID NO: 5785 - protein, 255 aa, synthetic construct
  REGION 1..255: note = TnsF-Tn7 System Protein
MKESTMAQTQARLDRRQWEPGVYAIVGATGIGKSAEASKLALSHSAPIVVADRIQCYSDLLVTSGRAFDAKVEGLTRVWLDNRTVHQGNFDPDEAFDRLIKVLTSYVDRGEAVVLEGGSISLILRFAQTISNLPFPAVVNVMPIPDRQHYFAQQCARARQMLRGDSTGRNLLTELAEAWAVGDQHNFVASVAGLDCVLDWCATHSVTPKELADRDLTMEVLDELAASMGGRYVEHGVLQQEIFLRTFGAPGVTAR

SEQ ID NO: 5786 - protein, 115 aa, synthetic construct
  REGION 1..115: note = TnsF-Tn7 System Protein
MTRRRRLDFHWKLRQQMAAHDMWKTTQLAPLLRERGIDLSAAQIYRLVTDKPERLSMKVLVALCDIFDCTPNDLITPEVISTRGAKAAGDTSTRNVTSLNPDLRPERARITDPDS

SEQ ID NO: 5787 - protein, 527 aa, synthetic construct
  REGION 1..527: note = TnsF-Tn7 System Protein
MTTDTQPGVAGDPQVAVLRGAVDHFIDEIIGRSPAARLRLLTELRHELNASLDSARVQAMTDASAQGWGLRRIAEQCDLSHEQVRRLLAGSVDAAKSARSKYSKNQGICRECAGMARRFCTRCGEEEGPLPAGLCQRCTLADALCLVLDDGNGQVSPPLKPLFDGLCAATEPGTVLEWLTGQVRDLLEGLATGRIGLTHEALNSLEPVRTVDHLRDLLVHHGVLPPLDKQLALFERWLPRYLDNLAEPVHARLVGHFATWHVLNRMRRRAAKRRLVPSANDHAKQQVSQAAALLTWLDGRGRSLGKLGQADVDAWFAESTATRRPSLDFLRWCAETGRTSKLTLPTGKVTNPAPITQHRRLELIRVLLTGDRAPLFVRVAGLIVLLYAQPVSRLIRLTTDDLTENDTEMLLRLGDPPVTVPDPFAALLRGYLKQLPRQINSTNPSSAWLFPGQRAGQPASVGGVRDALREAGIPTLAARSATLRQLVLQAPAPVIAVMLGYHHTTTTGTAAEAGSPWSKYAPGDHSK

SEQ ID NO: 5788 - protein, 527 aa, synthetic construct; identical to SEQ ID NO: 5787
  REGION 1..527: note = TnsF-Tn7 System Protein

SEQ ID NO: 5789 - protein, 141 aa, synthetic construct
  REGION 1..141: note = TnsF-Tn7 System Protein
MKGSPPKRRSVLTVWDWIAETVEQWETEVRPLFTTADAGALWPSERGPRIGFSQMNTRLATYRDALGLDAGLDFHSFRRSYVTHLIEDGFDARFVQDQVGHEHASTTSIYTCVSSDFRTRTLRRVLDTTIDAALRPARSMR

SEQ ID NO: 5790 - protein, 189 aa, synthetic construct
  REGION 1..189: note = TnsF-Tn7 System Protein
MRGEAPGTARLQLVGGLPLLRPEEQVFEAMLDGWRNQQLARNLAFSTIEGREATVRGFAGHADAFPWEWTAQAVDEWCGDLRAVRKVKQSTLRNYSGSVRSFCQYVTDPAYGWAEQCETRFGTHPVQVVHEWNSAVHAQEYEGDPSKRAFTLDELQALFDHADEQVTQVRGRGRSSASTASATSALARL

SEQ ID NO: 5791 - protein, 921 aa, synthetic construct
  REGION 1..921: note = TnsF-Tn7 System Protein
MRRTTEMHPADPGILGRAAELSRIEGLLGAVDGTGPQVLVLTGEAGAGKSTLVGWTAEQGLARGLRTLRVRGSEAEAGLGLSGIHQLLHPLLPGDALPVNQRKALDRAFGMAAAQDDMTLDQLSLCMSVLTLISDAASRQPLLLLVDDAQWLDLGSVDVLGFLARRLEGKPTVMLLAAREEAVPARFDRDFPHVAVGPLDRAEAGVLLDAQPNPPRGRARTQILQQAAGNPLALIELSRAIARGRTGTSQDGGAALPLTTRLENLFAADLPGLPAPTREVLLLVAAAGTGQLADLLRAAPSLDAVQALAPAEGVGLVRVEDGQVLFRHPLVRSAVYQAASFSDRRQAHLALASALTGEPDRRAWHLAAAATRQDAEVADALAESADRAHARGGYAAAAAALERAAELPPASELRARRLLSAARAAMFAGHPQWVGEISGRVGDLTEDPRLRAEASLLAGWALGVTLRHEEALALLLGVAEATAASAPDLALSTLATAATSVYNSGAPFYRAQLRRINALIGEAHDPAAFAWSQAVIDPHHQRTRLVGLLEKGLAAMSQESLGNMTALGGTTWILDETGQAIRILEQTMDVIRRAGGAGANATVTQALALALFESGSWTAAQSAAEEAFWMATEAGADNVTVGSRILQATLRALQGDHAAARTRALEAVRGVDLRKSLSLQVRHRHAVGMAAFVAGEHADAYEQLRATFTRDFRPAPVHYHASVYYLGDLAAAAVRAGRPDDARTVVDAVGHSLGPDRSPRLAAVLHRAAALLSDTQDAEDHFHAALAVSAVDCWPFEKALTQLDFGEWLRRRRRSTEARPHLSAALECFQRLDARPWIDRTAAELRAAGAPAAAARPASELTAQEQQIAELAAQGLTNRDIAARLYLSPRTVGYHLHKIFPKLGIRARAQLRDALSHDPPQ

SEQ ID NO: 5792 - protein, 921 aa, synthetic construct; identical to SEQ ID NO: 5791
  REGION 1..921: note = TnsF-Tn7 System Protein

SEQ ID NO: 5793 - protein, 829 aa, synthetic construct
  REGION 1..829: note = TnsF-Tn7 System Protein
MTVRPPQEAASRTVKSPPLGRDGEIERILECVTRTPGSPQALLLLGEEGIGRTTLLRHAREPATGNGMLVLSARGWAADRRHARACLLRQLLAPVLEELPALPAVHGQVLSAVRGDAPLPGLPPDMESLHLGPLSVPSAAALLDRQPAAPTGRRRLEILEEAAGNPLALVELSRRAPTPARAGLSGVGPAQRPPTTHVFGARLDALPPETGRALLYAAAAGPGETVTALMAALGTDDLAVWAPAEAAGLVSLVEDRLVFRHPLARSAAFLRHPAGERHRAHLGLAAAATQPEVRARHLAAATLGTSEPVAAELEDSAWRRGDAVGAARALEQTARLSPQRRERARRLAEALVAAHAVGDPDWVRDLYGRFVQDSTDPELGCVAAGALASALSLESSQQEAFDVLANVSEHFPAVGRPVALALAALAAGIAVQSGLPEHTAALPTLLDRAREARRTDRRRLPVTGLLGRLDTPNAQKALDTLVTAVVRPQDATHLLASLGRPRSAPLDAPDALACRVAVALAAYLADEADVYLGELRKADAHLRASRAFGIRAWPVLALLDTLVNTGRFTQAEPLIREARAEAAVLRLPRLQADLEAQALTVLALRGAVPPEPWLTPSIWRAVSLDENRATHARLLRARGLAFMALGDWDGGWRHLRELFTADGSPLHPFLSPRSIAELAAVAQRTGRSKEVVPILARVRADQGERPSTRMTLLLHHATALVDPDDDAEQHFQLALVNHEADRWPWERARPPQLRRVAAPMPPDTRGASATDHGAGNRRTPRRRRPRGSRPPRTARQRSGTHPQSRRPAGAVDGTAAADRPDGRTRPFES

SEQ ID NO: 5794 - protein, 829 aa, synthetic construct; identical to SEQ ID NO: 5793
  REGION 1..829: note = TnsF-Tn7 System Protein

SEQ ID NO: 5795 - protein, 110 aa, synthetic construct
  REGION 1..110: note = TnsF-Tn7 System Protein
MKRQVSYQWRLREMMATHGMFNATDLAPLLVDRGIRLSSVQVWRLVTQTPERLSMPVLAALCDIFECTPAELIVTKAENTTRRRTATSAAGGDVDLAAIIRPKRARVRPE

SEQ ID NO: 5796 - protein, 524 aa, synthetic construct
  REGION 1..524: note = TnsF-Tn7 System Protein
MHESSRTMANPGRPATGGNGSARPPTLNDLPIPRKRGRPRSSGDYLCSRCNQLVAKIRVRWPDGPVCGACFTEATHTRGRCPRCLETRMLPGRSPDHQPICRDCAGITTKLTCTRCNREIERFRGGLCIRCALKDDLTAVLKPGDNLSLHRLIDLLAEAGRPESIYTYMRPGTQARELLNAIGDRTLPLTHEAFDALPQSTAAEHLRYLLMHHRIMPGRGNERLVRFEQWLATKISGLPDDGTAKIIERFAAWHHLKRVRDRATDPTVNLETVTHAAKQEITEAAKLLIWLRGTHAIGADELRQAHIDEYLSSGPSTRKHVRNFVRWLNQQNRRPYGQLDAPFRPAHSVPMITQNERIELVRNCLDYNHVTTSTRLAGLILLLWAHPINKIAMLTHDDIDSSPEGIFLKLGTIPAAIPEAITEMFWHQRQGSENRNTTNTNTKWLFPGTRAGQHIHPATLSGRIKVLGIDSQRARNATLRDLTQEVDARTLMDLLGYSPAIIAQHAARSASRMADYVCLKQQHT

SEQ ID NO: 5797 - protein, 410 aa, synthetic construct
  REGION 1..410: note = TnsF-Tn7 System Protein
MDPVNNPYTPNAGATPEIVIGRDDLLEDFRILLRRLDKGRTNQSMIVTGLRGVGKTVLLGEFRQIAEEFRWKVLELEASKHDDDHFRRTIYSQLRAALYQISPRAKWGDKARRAAQVLQSFSLSIDPSSGIPTLSLDVDAAEGFADHGSLTLDLTDVLVSIGEAAREHGTGLVLLFDEVQFLSQSQLEAVIQAIHKSVQRKLPVTFVGAGLPQIAELAGDAKSYAERLFKFPKLGSLDFDDAKKALAEPAHIEQVHFEDDALVRAFDLTEGYPYFVQELGYQVWAVADGDTITLEDVEDAKDAYEAKLDSSFFRVRLDRATQLQIAYMRAMAQLGPDSQKAADVAAVMGRESTQLAPTRSELINMGLLYTPAHGYAGFTVPHFDRFMLRAVPHLDVPPVQKRRTKPKKAE

SEQ ID NO: 5798 - protein, 410 aa, synthetic construct; identical to SEQ ID NO: 5797
  REGION 1..410: note = TnsF-Tn7 System Protein

SEQ ID NO: 5799 - protein, 384 aa, synthetic construct
  REGION 1..384: note = TnsF-Tn7 System Protein
MRKLQRVLDDARRTMARDDGNVLYVPFGGQTPDPDSFLALVLDGWERQQRAKDFSAATIRTRRNVVLSLVDFSGRYPWEWSLGDADDYFSHARAVRNLSHGTVRSYQGAVKLFCDYACSPHYDWCEQSAKLFGRVFAQVVTELNRVTHSQPTEARPGKRPFSQRELQELFDLADLEVERILDSGRKGALSAWRDAIAFKSAYSWGLRSEEFRRLQVSDFSRNGKAPFLGNHGVVLVRWGKPHKGSAKKVRSVLTVWEWSAEMVADWIKNGLPRYGYPVTDLFPTSSGKIVGESHLNGRLHDFLDELGYPPGLDLHSFRRSYATHLTTGEGFDLTFVQLQLGHDHAYTTSLYTLPSPDYQRLALERVHDRTIKAALALPSERKHP

SEQ ID NO: 5800 - protein, 112 aa, synthetic construct
  REGION 1..112: note = TnsF-Tn7 System Protein
MSRREIAYTWRVREIMARRGVHTAKELAALLHDRGITLTANAIWRIVTQEPERISFKVLVALCDALDVTPNDLITYSATEAKTIRHRKAAGEDIPDLHNYRPVRARIVEDDG

SEQ ID NO: 5801 - protein, 486 aa, synthetic construct
  REGION 1..486: note = TnsF-Tn7 System Protein
MARPKAPEDADAYEACGRCGEHRPVAARWPDGLICQNCYRKAIRTSGTCAVCGHVGILPGTADDGPTCRTCSGVRINVDCVRCGAEDELYSQGRCWSCALSNYVDTALSAPNGGVPAQLEPLADALKRMQRANSGLTWIRQDHVQATLRMIATNGTITHEAIDELPKSRTRDFVRGLLIEHGVLPRRDHYLAAFSEWLTQIPNRVADDEHRRLVDRWIRWNFLRKFRAMDEVPRNAFLRAKQSITVGVDFLNWLTEHHVTFVDTTQGDVDRWLTSGPSTRQFIDRLIPWAQSARLINRDLIVPRHRRGTAPRMSASDQASATERLVHTDELSPRDRAIGILVLVFGQQLRKSLELRWSDITVNEDTVCVRLGSIDLELPPPLDAPWRELLTEPVNLRTASHPSSDWVFTGQSPGRPINPGHIATHLRDVFSARAARLGALHELSKLGPVPIVAEALGYSPETIEAHRVDSGSTYAQYVGAVRRQRL

SEQ ID NO: 5802 - protein, 486 aa, synthetic construct; identical to SEQ ID NO: 5801
  REGION 1..486: note = TnsF-Tn7 System Protein

SEQ ID NO: 5803 - protein, 800 aa, synthetic construct
  REGION 1..800: note = TnsF-Tn7 System Protein
MHTSPPDARHDDERAAAVHAADGHDRIRVRGARANNLRDIDVDLPKRRLTVFTGVSGSGKSSLVFGTVAAESQRMINETYSAFVQGFMPSLARPDVDLLDGLTTAIVVDQERIGADPRSTVGTATDANAMLRVLFSRLGQPHVGGPNAFSFNLATVTAGGAITVQKGKDAKAEKVSFSRLGGMCPDCEGRGSVNDIDLTQLFDDSRALGDGAITIPGYGTDGWNVRMYAESGYFDKDTPIRDFTEQERADFLYREPTKQKIAGINMTYEGLVHRVRRSFLQKDREAMQPHIRAFVDRAVTFTTCPACDGTRLNDTARSSKIAGKSIADVCSMQITDVTAWLRGIDEPGVGPLLDGLRELLESFVEIGLGYLSLDRPTGTLSGGEGQRVKMVKHLGSSLSDVTYVFDEPSTGLHPHDIERMNGLLLRLRDKGNTVLVVEHKPEVIAIADHVVDLGPGAGSGGGTLCYQGPVDGLRGSGTITGKHLDDRVAVKKTVRQSSGAIPIRGASAHNLHDVDVDVPTGVLTVVTGVAGSGKSTLIHGSLAARDDVVAIDQSGIRGSRRSNPATYTGLLEPIRKAFAKANGVKPALFSANSEGACPACNGAGVIYTDLGMMAGIANPCVECDGKRFDQSVLGYHLGGKDISQVLAMSVSEAEAFFATGEATIPAAHTILARLADVGLGYLTIGQPLTTLSGGERQRLKLATHLGERGGIVVLDEPTTGLHLADVAQLLGLLDRLVDSGKTVVVIEHHQAVMAHADWVIDLGPGAGHDGGRIVFEGTPADLVAARSTLTGQHLADYVRA

SEQ ID NO: 5804 - protein, 800 aa, synthetic construct; identical to SEQ ID NO: 5803
  REGION 1..800: note = TnsF-Tn7 System Protein

SEQ ID NO: 5805 - protein, 374 aa, synthetic construct
  REGION 1..374: note = TnsF-Tn7 System Protein
MAGAIPGAVPRHLKDRSVQLFRADERVFEAMVDGWTSQMLARGLQTSSIEPKLSLIRRFQNYTGTYPWSWGPADLDEFLAEHRLGERAYALSTLRAYSNAIAAFCGYVANIAYGWGDYCEAMFGEIPAQIVFEWNSPRHTADDARDPRRRAFTVSELQALFDHIDDQVDFAYRKRLKQWPALMRNSTAFKVGYAFGLRRRELAMLEISDFGPNPHVPDYGLFGALTVRWGKGTKGSGPRRRTVLTVPEFEWVVPLLSTWLSPGRRDRFKTADRSSALWPTERGRVAVSTVGDAFVALRRAVGYDEGLNLHCLRHSYVTHLLEAGYDATFVQTQVGHRHASTTSLYTSVGSDFKQKILQQMISTRIVQREEHHDE

SEQ ID NO: 5806 - protein, 721 aa, synthetic construct
  REGION 1..721: note = TnsF-Tn7 System Protein
MTAAPAPSPTRDGWGDAAKGILIVLVVFWHVLMKQYLQVDWRLGVPVPGAWGLLGDVVWPFLMPLFLLVSGFYASAAVARPWAAVLRPKVLRFLYLYLLWSLIHAVAMRAFPDFPTLVPRTVTEFVEAVTISPPDTWYLYALALWFVVAKVLRRVSPWLVIGAAAVLTVAVSAGATAIVGNRGSLLADGTFFLLGVHLAPQIRRLLPRVTLPVVLGLVAAYGAAFAAMRLSGTQQVPGVWPAVALLGTAAGLSAAPSTARLRVIGPALVRLGRRSLPVYLLHMPLLAVVDAVATGWLSDARPAVQLVAAVAWPVVLTAVLVAVCLLLARLADRDGARWLFDLPARRTSTAPGPTMRRRLRAPWRLTLAVALLAACTVAGARATAVPGCADDVRTTAATTPGRVSIGGVGDVLLHDVGHRVPVDGGAGHFDAVRSWFTQDLVTGNLEQVIADDTGFDKCGDRADCLSFRSERDAAQYLEGFDLMNLANNHTGDHGPEGYAATADALSEQGIASVGARDQIVCTDIGGTRVAVIGFAPYSGTNRVTDLRHVRQVVAAAAATADVVVVHAHMGAEGPEANVVSGEPESVFGEDRGNVRAFAHAAVDAGADLVLGHGPHSLRGTEWHAGKLIAYSLGNFGGGGVFGAEQATRYGVYLDITLDHDGSFVSGRLRSVTFEHADGRPVPDPSGRAAALVDRFGQRDFPTSAPTIDDAGVLAPPPQART

SEQ ID NO: 5807 - protein, 479 aa, synthetic construct
  REGION 1..479: note = TnsF-Tn7 System Protein
MTATPSQTCDRCGRSSAGRYSLLGEKICNVCYSALRRNPSECPLCGNIRVLAFRTDEGVITCAICAGHPPRFACRTCGSEEFLTGTHCGRCRLQARLDELIGPKGSAPIELTRLRVYLANAPMDPRSVVRWLRRPHVTETLRGMATGALPVDHSSLDQLQQRPATRYFRRLLIEAQVLPNIHVLQHELTLHVAAVAATLERPTGNKLRRFYRWDVLPKLHRRYRDRDRDLSNEAFIGQRGKLAAVVRFLTWMDARGLAVSDLDQRTLDHYIARVKTREPVEHFVRWATKTRLTGDLATNVRAARNTMSNVTKEELWRDIDLLLNGEDVELEVRVAGLFMLLYAQILGRAVSMTRDRVDATGAQVTVRFGVTPVVLDDRVGDIVRRHLSAAPRRGYAAGESSWLFEGLSPGAHMTAAYIRLRLTELGIRPRVSRETRMNLLSMRMPSAVVADVIGIGNHTADRRKSKAGGIWSNYPAVRR

SEQ ID NO: 5808 - protein, 479 aa, synthetic construct; identical to SEQ ID NO: 5807
  REGION 1..479: note = TnsF-Tn7 System Protein

SEQ ID NO: 5809 - protein, 928 aa, synthetic construct
  REGION 1..928: note = TnsF-Tn7 System Protein
MRGGLERWKRGVESHGVRSAIAYALQGQCDAAPRLSSGVDALAAYSRGDTPTVTRYTVEDGAIREDELSRGDLMAWVDGRDPVTGERRGRELLSPQADLILDGTINAPKSFSIVALVHPDLAREFEALQDRLRSRIITTWQQELNARRGAGGRIRQAIRRLEVVELQHRRSRALDPHIHRHLWLSVKVQGIDGQWSNVDSRFAMRLHTLINAEGDLAARTDPDWIAALARHGYTLNADGEIAQVAHAVRPLSRRSNQIEAHRAVALAEWRGRHPGQEPDRDVLQQIDRLAWATGRPGKPTNLTEDTWERLVREELAAIDPALLGDGNASATVSVVPELDFEMLGTIALVDADQRSAANGGRFSAVDIRAGATRALAASGVVAPRDDLQPVIDAAVAHALDNVVDLLDGEADRPMYVKGYMAPSTAALKVELAALFDQLNEPGVNISRPTIATVANASIGDLPLDEGQANAAAAIAGTHRLVTITGPAGTGKTTMLRVAKRALDVQRRRLVVVAPTKKAASVAAREIGTAGSSLHALLSDHGWRWNHDSTGSEHWTRVEPGDTDTAGHIYLGPRRYPLSPGDRIVVDEAGMVDLHTARALAILAAETGAGIAMVGDHLQALPVGHSGAMACMARRSGSVVELTAVHRFRDPEYAALTLRLREPASQSDAVSIATALDRGGHLHAVADLQQARDVMIEGYFRATAVRRRIALVTGANDEADAINTAIQQRRVEKRQLSVHRIAVGMDGQRILEGDVVQTRRNDHVAGVENRALWVVRRIHNAAIDLVSTTDSGDVRTIGTDYAADHLHLAYASTVHGIQGETTDLAIVGPDVDAAGLYVGMTRGRIHNEAIAIPRPGQTAVDVVAATMMRGLPEVTIADARRGARTELGRAARSEAPTAVPESRPGKPPGADGGHSATTPAIGVGSGLDR

SEQ ID NO: 5810 - protein, 928 aa, synthetic construct; identical to SEQ ID NO: 5809
  REGION 1..928: note = TnsF-Tn7 System Protein

SEQ ID NO: 5811 - protein, 255 aa, synthetic construct
  REGION 1..255: note = TnsF-Tn7 System Protein
MRREHKWPASRIAFELHLAGTPVSRRTVTRLLAQLGLNRRRLIDPSGETNRQPQPIIAKRPGHMVHIDIKKTGRIPDGGGWRVHGKGSAEDKAVARTKKRGARSGYVFLHSAIDGYSRLGYSEALEDERAVTAVAFLDRARAWFAAHGITQIERIVTDNGACYRASGFADAMGESRHQRITPYTPRHNGKIERYNRILAEEFLYARTWTSEPERAAALAVWNRHYNYHRPHGAHDGKPPASATPLQVNNVLASYS

SEQ ID NO: 5812 - protein, 341 aa, synthetic construct
  REGION 1..341: note = TnsF-Tn7 System Protein
MLDGWANQQTSRGLQATTIDSRRRFIEDFAEFCAAYPWQWQPRDLEDYSVRVRPGKGPLKRSTIRGYQTRIRLFCDFLTDPRYGWQAECLARFGDAPQQICHDWNTISHLLDHEGDPGRRALTFDELERFFDAADARVEAIVRARRKGALAALRNAQMFKTIYAFGLRRSECIGLDVADLRSNPVAPGFGSFGAVYVRHGKGSRGTGPKRRTVLTLPEFDWVVDGLTHWVDQGRPRVVGDWETDILWPTERRTRIGGRYLNDRFAELRDEAGLPEELVLHSLRHTYVTNLIEWGYSEKFVQDQVGHTFASTTAIYTSVGDDYKNRVLADALKRNTEDRDGD

SEQ ID NO: 5813 - protein, 115 aa, synthetic construct
  REGION 1..115: note = TnsF-Tn7 System Protein
MGTDSKGPIDWHLRALMAEAGMFQTTELLAPLREQGIVLSREQVYRLVTKAPERLNVEVLAALCRVFGCQPNDLITVVARPAAAKKTGTGRGRDTAIGDLRPVRARLHRPADPGR

SEQ ID NO: 5814 - protein, 281 aa, synthetic construct
  REGION 1..281: note = TnsF-Tn7 System Protein
MLDANAFGNQAVTADFLEFGNWLANKVGNKKAAISIHSHLKFFLMLDERWRGMPPSDVLLEQVGCEGLRLARVPIRWYNITRNYVIGDQLLKQHVERERIQKIMACVPSGSDKELLTDYLTILQLRFKSGHLKLSSLRGNLSAAADLILLARSDGVRLIEQDHLDRLLKIKPGIACSLQGFVTFCNTRRARWQSLAIDRLQTETQRRVKLETQMIKLAIAANSGRDVQRSWITKSLTYFHRLRASDARAVLPIPDPAGNGWSIELHGVTYWVPDPCHLSLL

SEQ ID NO: 5815 - protein, 229 aa, synthetic construct
  REGION 1..229: note = TnsF-Tn7 System Protein
MQTYRIPAVAHQQTRPISPTRRSLSGTFPLRNGDGIPYESLLERDFLARVTFSNRVCDVIAQPVQIPFQGDGARTHSYTPDFLINYHVDRQIGAYPVPLLVEVKPRDHWEKNWRKWLPKWKAAWRYAQENGWAFHIYDESRIRDTGFTNIQFLDRYKAMDFAREESEWVLQTVRDTGPVAVHYLLAVHFAGIYRARGISHIWHLIATRQLDCDIRQPLNDFLDVWIPSP

SEQ ID NO: 5816 - protein, 641 aa, synthetic construct
  REGION 1..641: note = TnsF-Tn7 System Protein
MNTLTYHGEKPQAFIPDRARLSLERNAFVRYGDDVYRINQVLDFKTVVGIDVYSGRAAALPVDGLKPIAQERLDGLYVNYDMESISEEQWAIAKRRFEAIEPLLGDVVRTKAEIKARALLYEVDTATVYRWMDRYKSWGELLALIPRKRGWQSGTVRISAEADELLDEVIREYYLSKTRPTVSKAVSEFRIRAQARGIPMIAESTIRQRISRISDKQFLRGRGFADKARNSYTPSPGSFPGADFPLAVVQIDHTPIDAMVVDDVHRKSIGRLWLTLAIDVHSRMITGYYLAIDAPSVISVAMCVAHSIIPKEEWLIAHGIEGDWPVWGFPRVLHSDNGADFRSESLRKSCSNYGIENRFRPVKRPKYGGHIERLMGKFMQAVHGLPGTTFSNIQQREGIDSDAQAALTVSEFEVWLVREILKYNAKYHAKIFMSPLHKWNVGIFGGRDDTPAMGLPPRPADPFTIQRDFLPAYERTVQHYGVELDVTYYSEALRPWINAKDDSGKTRKFIFRRDPRDISQLWFYDPHLKQYFKIPVANQSFPATSVWEFRAAKKQAVEQGLANIDDDLIKRLIIENRELVESAKATTKKTRRLAQRQKIHQQNKTPALPAATPAPTIQITARPAGYSGLVDDLDDGFEDIL

SEQ ID NO: 5817 - protein, 603 aa, synthetic construct
  REGION 1..603: note = TnsF-Tn7 System Protein
MSHSVIRCPFTFAKPQVRFDGHFKDIKGDLLVLWYGTFTPNRREKTVPLVNVHFRTVDRDGSLGAFYSVPMGLPYLSYFKVGTVWREGAIHSDTQLETLAAVTVDFSPDKWRFVTASQAGLTSVKSPYKLPLSADTWLVEFRTGTEGQTVLVPCVELLIRLYGRSSETSRILTTYPWNEVQSRFFFDRDETWPTNVVKLQRSVRESEAVFLAHLRHDEYTKLRSKKLYSDLEAEFKSKQDAIQCFGNLQVAPWFIGPAQIRGSGHWIDSNTFLCLRLTGSSEPMGPELEIHRAEYETQDLNPEDDDGGLFIKRPTKMLPLDQQVELTNDHAPDTDAGTYILLSESFEVLGQRRPTSRYFQRKPGERGQKVVVTDNSDVLSAGDPNGRGSGNGKAEIVDMEPWESSGVLVDVWKALKGLQKSFSTVIKTVEWVTLDDQSGTQPPVKLVPVKEFEKDENATPEQRAWVYLDVKRKIVRGVQILRIVCGNRQFYLFEFQRRPVNVDGKPSEQKARALLTELSISPKLAEIQIKKILNLMRLYNGAFRDFVDNLEGPSVTFKHTKYKADEILHFTCLKNKFIELGVNFPKASPSKAKKDGRDQAPNT

SEQ ID NO: 5818 - protein, 356 aa, synthetic construct
  REGION 1..356: note = TnsF-Tn7 System Protein
MNRWPLYQSIRDDELISSWLLRNALAHGCTPLAFCGELWPAVRLWTMDIDCGVKQKLFRQLDNDEFPGLAAADERFHAALLCISSTDVRRANTRWLLSLGLRNRQHHCGLQYCPACFEEGQPYFRYHWRFAWQTGCTRHGICLISRCRNCHAPIQPQLLVPPATDCSICHVCGEALTSRSIATPCIPDALSLQSVADNVLSRSCASAQACEWFEYAYLLVSLLRYALRTRSGSTQLMLSSLNVDVKPQYQIRSGLPLELLEVNERMWIMSLLAPLVALPSELLAQAISDYHLPLSVFGRHMSASCSSAAAQALVSAAVVHSHKAACIKRIHPAVDRVTVEREWQRLQRKIFAYARP

SEQ ID NO: 5819 - protein, 295 aa, synthetic construct
  REGION 1..295: note = TnsF-Tn7 System Protein
MNDYPHIHPDFRPVMSLSDEERIRFLQEPRWIGYPAAHEIINALRTLLTTPSRPRMPNVLLVGDSNNGKTTIIRRFVELYGQSYVNAQAEPVKPVILVESPPAADEKGLYISILESFWAPYRASDATAKLRYQVVHMFRSCHVRLLVIDEFHSLLTGSAIKQREVMNALKLLCNTLAIPIVGVGTSDAVRVLHTDPQHASRFDVISLRRWEPSTEFQRLIKSFESVLPLQHASGLSKPELALALHSISGGNTGDLHRLLMECAKDAIVTGSEKITKATIEKHAWLQPTRGIRERV

SEQ ID NO: 5820 - protein, 295 aa, synthetic construct; identical to SEQ ID NO: 5819
  REGION 1..295: note = TnsF-Tn7 System Protein

SEQ ID NO: 5821 - protein, 476 aa, synthetic construct
  REGION 1..476: note = TnsF-Tn7 System Protein
MPQCDECRDVVERTHKIYKQLKFCHKCYMRVFKKRVCPSCGKVARLSKYDNSAICKKCENNRPCIRCQQINYPIGRITNHGPVCNSCSVYFREFQACERCGTLSQKLSRISRFADNLRVCPKCATRDYKTCPRCKRYRLLEVESLSGQMFCKKCLNYSTGHCQVCRHQIPAGRGDLCERCSWHQSLERRIVKLVNNLENHSLREYFKNYTKWLEQKLGPHKTALVVSKHIGFFEETSDLWTNKVPIYRVLLQRLRSSGLRKYVLPMQWLIKVHNLKIDIKAKEFCSELDQLKKLTSICPESSFSAQVIQDYYDSLINRVNEGKISIRSARLAMKPASVLMLQMSKSRFDIPRIWHIKHYLSLHPGQAAALVGFINFLNKKFDANLNISFILNFNFLKDIRKQKLEKEILKLIRDAEISFSLLRWVRVCLKYFHKLNDYDSKKVTLSMINEVEDGYIVSYQNEGYWLPNRSLIHHTE

SEQ ID NO: 5822 - protein, 476 aa, synthetic construct; identical to SEQ ID NO: 5821
  REGION 1..476: note = TnsF-Tn7 System Protein

SEQ ID NO: 5823 - protein, 232 aa, synthetic construct
  REGION 1..232: note = TnsF-Tn7 System Protein
MYNQLCDTVKIVPARRKIGNTRISVSGLYPFKKDSAVAFESTLERDFLIRLEIDPKVLAVESQPFTIEYFDNGKKRVYAPDFLVTYKHDNFLPFIPPKLVEVKPTEELKLNLHLWKARYRAAMTVCKEEGWKFHIAHEGRIRDQLWSNAMFLQKYRKMNFLLADSKHLLDYVRDREVVTFDTLLARHFLGKWDRANGISQIWYLVAHGFLVCDLSLPLQPSTELWISGNCYE

SEQ ID NO: 5824 - protein, 629 aa, synthetic construct
  REGION 1..629: note = TnsF-Tn7 System Protein
MNDRRVNIKIAAGESVQVKGIPHTIIEIIDLKSVFVENKNTGRKGIAAISELQPATTIQQYEDIELITDKDWVEAERRFNIIRPFIEEGVSGRKEVELRAKQHDINAATLYRWLKIYKAYGTIDGLRPRKEGLPQGQKIINKHAEAVIEKAIKDLYLTNQRISVQKVVLEVKRLCHEYNILDVPHANTVRNRIAAISQRETLRKRGHKEKANNKFTPAAGKFPHADYPLAVVQIDHTPVDLILVDDFNRQPIGRPYLTLAIDVFSRVVVGYYLSLDAPSVMSIAMCVSQAVLPKEKWLALRKIQTEWPIWGIMNTIHVDNGPEFHSETFRNACMAHDIRLEYRPVKKPRFGGHIERLMGTFATDVHAVPGTTFSNIIQRKDYNSDKEAVFTFSEFEEWLIDFICNIYHKRKHTALGTSPLHAFELGIFGDKNTLGSGAARLPANDHNFFLDFLPSFERTVQTTGVTIDGLSYYADVLRSWINAIDPNNPKEKRKFIFRRDPRNISEIWFFDPEIKNYFKVPLADQSIPPFSIWEHKKIQELKKETGEYLKDHELGQALAKLRERVQEASAKTRRARRSQQRSTQHQHSINQAVIQDKKSQQKSTVMVQQLENLYGLLPLDELENDEDIS

SEQ ID NO: 5825 - protein, 208 aa, synthetic construct
  REGION 1..208: note = TnsF-Tn7 System Protein
MTLSHLGVLFLDELPEFDRKVLEVLRQPLESKEIIISRAARQITYPANFQLIAAMNPCPCGYAFNQDSRCQCSPESIKRYQNRISGPLLDRIDLHIDVPPLKAQELQDPTPTEDSTTVRQRVIYAYEQQMQRQDCLNQALSPKQLEQHAVLDSTSQRMIEMAQQRLNLSARAYHRVLRVARTIADLAQSEVIQSPHLTEALSYRGNHS

SEQ ID NO: 5826 - protein, 361 aa, synthetic construct
  REGION 1..361: note = TnsF-Tn7 System Protein
MVCITETHPWGIRTPLYQNEALSSWLIRAALDCGCDPLSLTGILWPKWRPWTLDIDQGLNQEYSKILVSVTSITQDQFDAATFKDLYLQNSEVSFKSWILALGAKNRKHKGGWQYCPKCLQEDFNAYFRLNWRCIWHVGCTKHDQRLLDQCPYCHSAIQPRLLEAPDRVIYCCAICKKHLFDEKEYPIDHNALAFQEDFDLFLKQGYAFYTDVLISISEWLKVIQLFNQLIRKVLTGSLDSRGWKFLHELGIRVPHNQLISTGLVLNQLSVLERERIFSCVYQLLNISHEQFVETACSLNMTIASFWDKRYELPTSLLTIEKRLGTVSRGYSSLKVYPHVPKPSNKEAVLRKILRLKRKIL

SEQ ID NO: 5827 - protein, 283 aa, synthetic construct
  REGION 1..283: note = TnsF-Tn7 System Protein
MSNYSHVFQEFRPILDQSNEDRLYFLEEDRWIGYPAANDLLDQLKGLLSLPKRSRMPNLLVLSKPNNGKTTIINQFFKLYGEGYVNAENNAVKPVIVVQAPVSPDEKALYMAILDRFWEPFRERDPVAKLRYQVVHCLKLYEVKLLIIDEMNSLLCGTPIKQRTVMNAIKYLCNETQIPIVGFGTEEAVRVLYTDPQHVSRFRVVNLPLWQLDKEFQAIVNKFEKVLPLKQPSRLAEPATVKYLHDITKGNLGNLRSLLREAAKKAIITGQEYIDHQLLERVK

SEQ ID NO: 5828 - protein, 283 aa, synthetic construct; identical to SEQ ID NO: 5827
  REGION 1..283: note = TnsF-Tn7 System Protein

SEQ ID NO: 5829 - protein, 606 aa, synthetic construct
  REGION 1..606: note = TnsF-Tn7 System Protein
MTNSTNTDQNTNSLDKKKADTLWKILEPYKDKYLQVWWYGGMEKGKRPGDQPQVHVLFREVREDFSPTDNFFQITANITDLVSWRVDTVWHQQRKVKSLNDDAYKFVIDHTDFEFKYLKIYKDVSKTKKFDFFKNREEYQKEDFQKEDSKRKNCLSFKVEHPEFDEILIPCLEFLTRAYGLSTELIRVLTTYNERERELRLYIPHKGEQGLWTVLLGDGITRADHVFVAYYKYTELAKNAARILYSSIVGNTHLKHTNIYPKVVPWHTETLPIRVSGFRLAGTKTFVVTRIRGIKVPKDDHIRIIPKVTERINTTTDNDQPNPPLPQLGNGDINVSTNQGGRRPPSDHELIEDDFEWIDGGPANELSKYKFVKQVKRPKRKKKFIETQTIGTGAPDNSPEVLNSQIVPSTNNSKEFQAPQDGRIIGLWKACVKAMEINPYLIQQVNYYTFEKGFNYSELPMLIGFFTESESQSHKSWCYANSLKTHTRGALIIRLTVSGAEPIYIFDIQPTIYTSTEEGETIKKEKGHAGLVFQMKQEKDLKQFISDLMYLLPLHEGSYPPKVFQNLLATQVFLFRHSNTKGLTEGESTLLNALRKIGIDKVSFKK

SEQ ID NO: 5830 - protein, 267 aa, synthetic construct
  REGION 1..267: note = TnsF-Tn7 System Protein
MSWLLSHDAANPKLPATLLSHTAFFVALDRAFDSSERLLPQAMLDLFSVQGLRRHVLPLRFLAERVGLEITDEEKAEHVETCRIGAIIETVETKSCSEDFVRFNQWLILDGKPTRTRRLYISTAARLSQSLGWITLSQLDQNVVDRYLSKNPGTRNDLGATLRFARAELGCDIRLPPPRTRRVQEEKPVRQLRALLKKIELGGEASPIELFEKAVCVAMQISPAAIRSGKWWPEKRGGRWLVVSSTETINAPAELNDVIAGWMAARC

SEQ ID NO: 5831 - protein, 437 aa, synthetic construct
  REGION 1..437: note = TnsF-Tn7 System Protein
MLSPQNDRRLPVTVLSGFLGAGKTTLLNAVLNNRAGMRVAVIVNDMSEINVDAQLVRDGGASLSRTEEALVEFSNGCICCTLRDDLLQEVKRLASEQRFDYLLIESTGIGEPMPVAATFSVRDAEGFSLSDIARLDTMVTVVDGQNFLKDFSSSERLADRDMQAGPEDGRGLVNLLSEQVEFANVVMISKRDLVSDADLFKVKAVVKSLNQDAVIVEATRGNVALDQIMNTRLFDYTKAQLAPGWMKELRGEHAPETEEYGINSFVYRVSRPFHPQRLAELLLQGIPGAIRAKGFFWLASRMDWVGEVSIVGGSTQTEAAGFWFGARHRVEAGVVGVPPEAIALLEGGRAMSTSLQDWTAPLPSAELVDDTQEYLSMQRQWHPQWGDRRQEIAVIGVGLDEAQARKALDAALLSDSELVRGPSAWLQLADPFPVWRR

SEQ ID NO: 5832 - protein, 437 aa, synthetic construct; identical to SEQ ID NO: 5831
  REGION 1..437: note = TnsF-Tn7 System Protein

SEQ ID NO: 5833 - protein, 378 aa, synthetic construct
  REGION 1..378: note = TnsF-Tn7 System Protein
MIADTIPVTLITGFLGAGKTTLLNHLGEQGALSETLVVINEFGQVGLDHMLMIEAKDDLVVELSDGCVCCTLHGDLTEALIREQSDRARAGKVPFQRVVIETSGISDPSSIGGAFVSDPQLAGRFHLEAIVALVDGPAGRQNIESYAEAAAQVALADMLIVTKAAHTEAAKLTALKELLCQRNPFARLVVLDEETIAAQDVFDSDLALRRPFVEVEAPSSGFMMGGQGGLLLGGSASPSPSAVSGHAGRYKVTSFDCKEALSRENLNAWFFTMLSLLGEKILRFKAIVDVEGEETPTILHAVQGLISPQVQLSAWPAQGRLTRMVFITEELATPVLQAGLDAFFPGSFRPCVQVRQPSQSPGAAPAELVQPLLQEAEL

SEQ ID NO: 5834 - protein, 378 aa, synthetic construct; identical to SEQ ID NO: 5833
  REGION 1..378: note = TnsF-Tn7 System Protein

SEQ ID NO: 5835 - protein, 218 aa, synthetic construct
  REGION 1..218: note = TnsF-Tn7 System Protein
MALMASDEPQRLVGVRSRGLSGRIALEDGAAAFESTLEQDLIELLDFDPRVSEILVQPFSLHHEEDGARRRYTPDVRATFIAPGAEVVVYEVKYQEELRENWQKYRARFGAAYRFCRQNGWRFKVMTEKHIRTPFLANVKFLRRFLRLAEQELTTGQLLYTLKALGPTTPQALLAATYMSSESRLRSIPMLWKMVGDGRVGCDLNEPLTMASTIWMVP

SEQ ID NO: 5836 - protein, 353 aa, synthetic construct
  REGION 1..353: note = TnsF-Tn7 System Protein
MAGTPSLAQSELFPFHRGVLPVEGELLSSYLLRLAGAHSADHYRFYSTLLPRAQLWNRDIDRGSDERVAKLLVERCRLAPAVVEAMSLRSYEVAIAGPGVRKGPGRGTWINPIGVFHRTRTLAGLQVCPDCLAEQNIYQRIWRLSFVTSCPYHLSPLLVVCPGCAAPIIPHRQLAGTSICHNCHIDHLSRTRRVTELAAVPPGQQVLIDALAGRGVPTLEERIPLPELVRGVALLRRWGMFRAPLSAKGVPIESQSPFVRSVYFDLVQELAVQWPDSMGRLMVKGRISRQTFETAKPPSWLACIGQHLSPRHSLKAPQKAQKSLASWLKHLRLTKPDGWREKRASALVKAAAK

SEQ ID NO: 5837 - protein, 617 aa, synthetic construct
  REGION 1..617: note = TnsF-Tn7 System Protein
MTHSSVLAKDLGTGESKTLRVEMLTPIVEADSTQEQAERDLALYSDEEWAEGQRRLFFIKPLLEKPVRYRADVEEVAKVAGVHFTTLYKWLRAFLLSGHVSSLVPAKAGPRTGTRMLSAEQESVIQSAIDDKYLSEDRGTAQDVVDEVKRRCRRMKLKVPSHITVRARIRDIPKATALRKRGLRDEARDQYQPLRGSFPNANHPYSVIQIDHTPANVIVVDEVSRLPIGRPYLTLAIDVRTRMVAGLYLSMDPPSSVAVGICLSQAICQKREYLAYLGVTGEWPAWGVMGKVHSDNAKEFRSRALSRACEDYQIDLQYRMKKTPHYGGHIERLMGTAARIFLGLPGKTFSNPKERKGYDSEAKAAMTLKELEAYLVDYIVNKYHKNIHSGIGMTPLVAWERGISGSDKEPGIGLLPAPEDPARVQLDFMPYEERTIQRYGYQLDNVHYYDRVLDPYINSVDPKTKQKAKYLIRRDPRDISVTYFLDPADNRYTAVKYRNVAHPAISLWELNAAASRLKEEGLKGVDEDQLFDTVDRLRQRVDDALNATKSAKAARRSAARRPPGTRPAPAKQPARTVAVPSAANDESIHGQKGANDQSFGDDPFAEPITPFSVSLKR

SEQ ID NO: 5838 - protein, 1295 aa, synthetic construct
  REGION 1..1295: note = TnsF-Tn7 System Protein
MRLPAWLLLLALFAPLPAWAGGLRVEVVTTDFVMPAKITAIDAITGAEGVHVAQRVVGKGRELPPSWPAGADWVILDSPRPSDAEQILAAVRTALTSAQIPWVQVGGGPPVSGQLSPDHARQIASYYGNGGATNYLNLAIWLHKWSTGDPGLGSVPAAQVLPATGYYAGPGRTTSASQSDIEDVWRKAGQQAWPRVAVLIAANNVSSMQTQVIDALIVEGARKKVSVFGVWYPQQARNGLSSAIGAMDVSAVVNLTHLQNGAALIEEFSGLDVPVIQALNYRQGNAQQWRDATSGVPMSLMATFVTLPETWGISDPTVISATDRGSLQPIPEQVEALVAKLAALSRLRAAPASDKHLALMFWNSPDGEKNLSASHLNVPRSIASLLPKLASAGYAVTPADEGQMIEDAQALLGGYYRPASLDALLARDLAVAFPVASYERWLETLPAKRKSELMQRWGDPKNSPYVRNVKGQASFVLPRLLLGNLLVMPQPPRSGGVGQATHDLDAVPSHYYLATYLYLRQGWKADAFIHFGTHGTQEWTPGKDRGLWAGDYPWLAVGDVPVFYPYIQDNVGEAMQAKRRGRAVVVSHQTPAFAPSGLYDELRDLHQLVHEYQQLDEGQVRESTAAQLRQMAADSGMAGDMGWSSVDMQTRFPAFLQALHDHLHELARRQLPLGLHTFGEPAADDLRLFTVMQQLGPNYLKALGLDPAEANSGDAEQIRSAAPYQTLVSYLRDGKAISAADGPELREQLERARRLDAELADTQEVESLLKGLAGRFVPPGSGGDPIRSPEVRSGRNLYAFEADRIPTKAAFESGRVALDQLLEAYRQEHGSAFPGKLAISLWSSEAIRHLGVLEAQVLHAMGLRPRWDDAGKVVALEIVSEAEMAHPRIDVVVQATSVYRDQFDPFLRLLAEAAERLAAMPAESNNPIARNSQALKQKLMGLGVPEERAGALANLRVFSNAPGAFGSGLNKAVLDRSENAPKDDATLAAGFLENLQYGYDAKGQVQTLAGGNLFAEQLRGVQAAVLSRSSNVNGLLSTDHPFEYLGGLALAVRHLDGTTPSLFISDLRQASPKTTTATRFLADELRAGVLNPAWISAMKQEGYAGTLEVLKTTDNLLGWQVTAPGTVREEQWQAMHDTYVRDIRGQGVSDWFEQSNPTAQMQLIKRLQEAVARGYWSPSDQTRSELQQRLDRLTELTNMTSDPSRKEAPPATATATGYGISQGSAQAAAASSPKASDASPEPAASPMPTVRGRVMRQMNPPPPADAGNTALALLTILMLTALGAWFQARSMKSKT

SEQ ID NO: 5839 - protein, 294 aa, synthetic construct
  REGION 1..294: note = TnsF-Tn7 System Protein
MSAEHLLPEVAEVLDEPNKDRIEFCRQDRWVGYTAAIKALDELDDLRNFPKNLRPNNILLVARSGNGKSSIIDYFVKRHPMGATEEGKLVVPVLKVEMPSKPDESEFWSLILWILGISHREGDRAAHKKRQAKSAMVYANVQMLALDEFNNVAEAGRATADLLAAIRNLSNELRIPIVAAGTEKAINALNLDPQLKSRFEPIALPKWSLDKEYLSFLASYEQLLPLAKPSKLIERELATTVFSMAGNTIGQTVKLLRRASVAAIESGTEQITLDLLKSLEWTRSDGWDTVARSV

SEQ ID NO: 5840 - protein, 294 aa, synthetic construct; identical to SEQ ID NO: 5839
  REGION 1..294: note = TnsF-Tn7 System Protein

SEQ ID NO: 5841 - protein, 231 aa, synthetic construct
  REGION 1..231: note = TnsF-Tn7 System Protein
MAQAGMFADCTQADVDAWSVEHANSNRINVRAFLHWSARTRLTRRFELPAALSPGNAPMPDRQCTALLGQVLADHTTPLRSRVAAVILLLYAQPLSRITQFTIDDVVRDGDGVLLRLGDPPSPAPEPGATLLLEYLGQRTNMATATNRESRWLFPGRRAGQPLRSDTLSALVHALGVPATAGRAAAIRQHVLDLPAPIIATALGYHQVTTARLATEAGTTWPNYAPGDRSK

SEQ ID NO: 5842 - protein, 1482 aa, synthetic construct
  REGION 1..1482: note = TnsF-Tn7 System Protein
MSPRPGGEADKLGNHYEGAWIVLHVLEVLAGTAESVTVEELGEIGKGAEFTLRRRVASEIHQVKRQRGSANYWKLGDLHAEGVLHAARSHVAAGRQFHFVSTIPAQELQDLAEQARHSPDAKTFLDSLHGKAEQRFNYLSSTVYGSVQTAWETLRGTWGHWSSEREIRNRNAALAGLLLTGAPAPTAAVTLADLAVENLATTLDKQTISDLLLHYDLEIVPAGVAPTLVRATRNVHDSWKASIERELFRPSIHRVEAEQISERLLYDSRCAFAVGVGGSGKSAVLHEVVEQAESRDWAVLALRLDRQEPFSSTVELGQRFGLEASPTSSLARVARDQPSLLVIDQLDAVSKASGRMPQTFDAVADLVREATAFPNMRVLLACRKFDLENDDRIRTLTKEHQAKQVLVAELSDEQVLDAVWALGIAPGRLSRQQKAILRLPLHLKLLATIAEKTETFAFTTTRELFNAYWDQKRQDCRTRRGGTVRFADVVGALADEMSARQRLVAPVSVLDDNDLSDDADVLASEHVLIRDGQQYAFFHETFFDYAFARRWTRRDQSLVAFLLTGEQELFRRSQVRQILTYIREENPERVVTEMEALLTEPAIRYHIKHVALALLRAMDAPTVHEWRMVERLLARNDLPFVDQLWLSLRVLPWFDRLDAEGAFSAWLSGNDEQLQEQALGAMIGGVKERPDRMAALLAPHAGRAAKYPAWLRWITRFADVYGSRALFELVTEAVRRCEYDGHEHELFMSVHDLAKHQPEWAVELLAAYLVDRSDALAFDDRTRVKALLLREHGAMDLVIGAAAGTPASFSKALVPYMLKVMALTAYERDDGRLLDRHFMHRDHEPPYHELEEALAVGAVDALRKYVQQQPDEARPLLDQLAADQHEAAQWLLYAALAAAGAVCADYAVALLLDREDGLYAVNSLWEVRLLIEAISPHLSDEWFSRLEQAVMGFRPSWDSRPSGRVSFSFLSAMDEGRLSDTGRRRLGELRRLFNEEQPSAPVSFTGGFMGSPIPQASAEKMNDDQWLRAMAKHNADREDWRTLKGGARELSQVLKEEVKKDPGRFCRLALRIGQETHPAYTDAILMGLADGEAPVDDELVFQAVRHIASLNNPAHDRWLGWALRRHVKADVPADLIGILIDRAMRSTDPTDESLSQAPDTEDGDEDERDRLLERGINTARGQGAEILGDLLVHDIDGSRTKLVLPTLDQLAVDPSLAVRACVAHLIAACLRHARSEAIAAFRKLIDADDRVLATRHVELLVVYIGNGDAEIVKPVIQRMLASTYARVRRAGGRLAAYAGLELSADELLAVARTSDDVSIRSGAAKVCAGRLPFTANAAAAGAAVIQFVDDADQQVRREAAGVAATLRGRALRSFERELTALIASPSFSDAAPQLLITLDRAPDRVDDLIMKCARRFVEVHGRDAGDISTGAAADARDVGELLMRAYAQAADTRARAEVLDMLDSLLIAGAYGVAEMVDAGDR

SEQ ID NO: 5843 - protein, 1482 aa, synthetic construct; identical to SEQ ID NO: 5842
  REGION 1..1482: note = TnsF-Tn7 System Protein

SEQ ID NO: 5844 - protein, 378 aa, synthetic construct
  REGION 1..378: note = TnsF-Tn7 System Protein
MSESPAVQFDRVSVRYGQVTALRDFSLDVAAGETVALLGPSGSGKSTALKALAGFVRPTAGRVLLNGQDVTGAPPHKRGLGVVVQQYALFPHLTVADNIAFGLRARRVRRADSARRVEEMLDLVGMDHYGRRYPRELSGGQQQRVAIARALAIRPPVLLLDEPLSALDAQLRADMLDELRQLRDELPDVAMLYVTHDQTEALTLAHRIAVMREAELLDLDTAQGLYRQPPSEFTAAFLGGANLLPAIVREVNGTVEVGTVTLTATAPGPLTPGTRVRLAVRPHTIGVRTDGPGLAAILTGLQWRGASYRLTCMIDGLDEPGGLSVHADVPSIDGLPQVGSPVRVRLPEHGAAVVAKTGAGTPTEGATDVVPQGLAGVA

SEQ ID NO: 5845 - protein, 378 aa, synthetic construct; identical to SEQ ID NO: 5844
  REGION 1..378: note = TnsF-Tn7 System Protein

SEQ ID NO: 5846 - protein, 233 aa, synthetic construct
  REGION 1..233: note = TnsF-Tn7 System Protein
MGPREITQGEVDAWLAVNPGTRYEVRDFVVRAHRRGHTHDLLVPHRPKAETVGLDEDSHWDLLHQCLTDTGLPLDVRAAGAILLLFGQHLTRIATLTIDSLTSDDKDTTLTLDRTPNPLPESLADLLTELSTTKPSAGWAANTVRDWLFPGHLPGRHLSATVLSRRLARHGIPNRPARTTALIALAQDLPPAILGPMLGLHPITATQWRRRAATDWTAYLQARQRALDTGTGP

SEQ ID NO: 5847 - protein, 314 aa, synthetic construct
  REGION 1..314: note = TnsF-Tn7 System Protein
MYAIRSYARITSYNVCYTKLLRALQPWLERTLATLPPQHRNLLRTYAQWSVLRQARRRAARRRFTSASATRARNTIRCAGAFLLWLDEHHTALADLTQHQVDLWLTGPLERRHVRPFLRWAHQRRLTGLHDVRPRPRGEAPTWFSDTEHWAHLQRCLHDDTLPLDVRAAKALMLLYGMPVSKITELTSDRLHDGDQPVLILGDHPTDLPPAVHRLLRRQADHAHQESAIGRTTPPATWIVPGYAPGTHRSPAALAAKLRRHQMPAHPSRNTALLTLATDLPAPVLSDLLGISITSALHWTRRAARDWNAYLTSR

SEQ ID NO: 5848 - protein, 314 aa, synthetic construct; identical to SEQ ID NO: 5847
  REGION 1..314: note = TnsF-Tn7 System Protein

SEQ ID NO: 5849 - protein, 1066 aa, synthetic construct
  REGION 1..1066: note = TnsF-Tn7 System Protein
MRPLSITLSGVRSYIGTCGPLDFTQRSLVGILGDTGAGKSTLLEAITYALYGRTSWGDHGTQLIADGCEKMSIDFTFTVDGTAWRVIRVCHRGDRSPEVRLCSGDTDGTAVNGVRPVNRRIQELLNLDYASFTSAVLLPQGKFDTLLNATGTARTQLLRSLLGIDELQRLGRRAEDHRARVDALLRKATEARGRLREDPEADAHRLRSQQTEAEKSAAELSGHLDTLRRLQHEAGGLQQHGAETARAASALAERTATDVQAPLAALVTYDRILQEQLDTLDRTHEDTTRQRDLLQAALDEDRGSGLTITALAAAAEVLQAAPGLLSTLGEQQQELQQDLDRLREDDHSIQEDSDRLAKQAARLPELDEDAERARKQVEEAETALARLTATLRVLLEEGAAVAEHHAAQAAARSRLDDLTAASATADTALEEQRGRLQEAAKKLEAVQRGEAAHTAGASLSPGDACPVCTHPLDAAYTAPDPQDPKALKRAKRAHSAAATAVNDALTAQQQVQADIRQAEQDEQHHLQAADAARGRLSAQLSPARDHARSVAALTGHDEPDSFAAHLVADITTTADTLLAQTQPSATERLTLLDTLLEGARVRTEDAHRSAARIRDTAASATADVHTAQAVLTQRRKTLETARKKARQEQQRLDRARQQFLTRLEALPRPVQISLPDEDALPSPEAIAACASAATTHLERLSDLDREYTQVLRSLQQLAQQREDLAGEHRRRVAQPLRQQQTTLELRAEAATAASRLLNDAAVTVPSPPAAWDKPEDVAAYASALDAACADLREALDALQRATQATLEELASRAAAAFRTLTPLAPKAPLSPAADTNLLFTPSLLAPFHEQAGALQSQAAQAASGLAEATSQIPYARALDAAIKAGEQQQSAWAGLREELNDSRFPRHLAELRTHSLLTLGSRLLKDLSAGRFAFSKDFQIVSLGNNTARSPRTLSGGETFQASLALSLALVELHSRTSARLESLFLDEGFATLDAGALESALSTLRTHVGGDKLLAVISHLHPVAESVNDVLWVEKDVSGSTARWLTPQEHHTLVRSNFHNLAELT

SEQ ID NO: 5850 - protein, 1066 aa, synthetic construct; identical to SEQ ID NO: 5849
  REGION 1..1066: note = TnsF-Tn7 System Protein

SEQ ID NO: 5851 - protein, 566 aa, synthetic construct
  REGION 1..566: note = TnsF-Tn7 System Protein
MLRMSKVELYAAIRRDHRGGMSMRELERKHGVTWRTVRKALDSSWPEPRKKLPPRATGLDRYKPVIDEILRADLDAPRKQRHTVTRLFHRLVKEHGADVSYGMVRYYVAARKPEILVESGKAPLEAFVPQTHQPGHEAEVDFGDVTIRLAGELVTCYLSSFRLSYSGKAVHRVFASCGQEVFFEGHVHALRTLGGVPRTKVRYDNLKAAVARVLGLSRARVEADRWIAFESHYDIESFYCRPGIKAPTRRAASRARTATSGATTSSRFRGVLARRAERDGRAVGPAGRRPQDRLRSRTIAEEFALERPLLMPLPQEPFETGQLFTPRVDRYGQIPVRTNRYSVPIRLIGKRMRVILHASHLGVYDQNVEVARHERLIAKGAVRLDLDHYLEVLVRKPGAFPGSTALEQARSADKFTPVHDAWWTQAMKIHGERDGTRALIEVLLLGRHMTHEHVVAGLAAALRAGAMTADAVALEARKAAQAETEPAPDARTLGQPPATVTSLHEWRLAHLPPDTRPLPSVSHYDQLLRRRRTSGSGHRVLAAAEVAGQSSPVLQVSDAVLDADAS

SEQ ID NO: 5852 - protein, 163 aa, synthetic construct
  REGION 1..163: note = TnsF-Tn7 System Protein
MKVAYIDQYKETFGVQPICDILAETDAPIAPSTYYAARTRPPSARSLRDEHLTKEICRIHKANYGLYGARKVHAALLCEGLEVARCTVERLMRAAGLRGVIRAKSPRTTRPAPETDRPADLVERQFTASAPNQLWVADITYIRTWLRSPLASSCTVGGEASRS

SEQ ID NO: 5853 - protein, 373 aa, synthetic construct
  REGION 1..373: note = TnsF-Tn7 System Protein
MEGRVDLPGASHLVLVKHVVPLDPEPTVFEAILEGWARQQRVRFLKDDTINRRLALVQRLARFSGQYPWQWNAAEIEAFIDHLRSTSRSFAVSTARGHLGNLRMFLEFVTDPRYGWTAVCRERFGEVPQQVLGEWNTIAHTDDYEGRPGRRPFTYDEVQVLFDAADGLAEEIRARRRKGALAAQRDAALLKTFYAFGLRRREAWGMDRVDWRRNPQMPALGRFGVAQVRWGKSSRGGPPKRRTVLLVPEMDWAVPVLDHWECELRPRFSPGEHPAWWVTERRGRMSCRRMDEVFAHVRAVAGLDEELDLHCLRHSYITHLIEFGYPERFVQDQVGHRYGSTTAVYTGVSLEYRNRLLNRSLQARHTELWEPTS

SEQ ID NO: 5854 - protein, 121 aa, synthetic construct
  REGION 1..121: note = TnsF-Tn7 System Protein
MNKKMGIVWNLRLRMAEQGMFQTTELMPLLAERGIDLSREQVYRLVTHPPQRLSMDTLAALCDILGCTPNDLVEVRVTNTQVRKTAADGRGGRGGTGAGTPQHHPPGCTASTPTFAGTPTP

SEQ ID NO: 5855 - protein, 179 aa, synthetic construct
  REGION 1..179: note = TnsF-Tn7 System Protein
MFHDDDEHQDQLLRCLTDQDLPLDVRIAGAFVRLYALPVTRIVHLTTDCFQRDQDGAYITFDKVPVLLPPTLARLIEEQIARPLTRSVLQPAPGSGPAFLFPGPLGHQPRRPNGLTTQLLERGLPTLAAHNTAMIAIAVDLPPIVASDLFGIHVSTAIEWAALAQDSWADYLAARKATE

SEQ ID NO: 5856 - protein, 239 aa, synthetic construct
  REGION 1..239: note = TnsF-Tn7 System Protein
MGSASLSYKGYRYPVEVISHCVWLYFRFPLSFREVEELMLERGVTLSYETVRRWCAKFGQRYADSLRRRRPRPGDKWHLDEVFIEINGVQKYLWRAVDQDGMVLDILVQNRRDKAAARLFFRRLMKKTRTVPRVIITDKLRSYKAAHREVMPSVEHRCHKGLNNRAENSHKPTRQRERAMKGFRGTGAAQRFLSAFSGISPHFRPRRHLMTATDYRAEMTIRFTIWEQITGVAGPSTTA

SEQ ID NO: 5857 - protein, 192 aa, synthetic construct
  REGION 1..192: note = TnsF-Tn7 System Protein
MGGPPSDPILSGLVDALCAAKRPESTMIWKRSPKVQELLKGLGTGAIAATHEGLDALPSRAAEHLRTLMEYHGLLPPRDRWLPRFEQWIDDKLIDLPTEVARPARHFATWHHLRRIRAIADAGGDTQPSVRSAKQEITETVKFLSWLRSTYGRTIETCTQHDVDQWIATGPTTRYTIRTFLWQVPDNRSRQF

SEQ ID NO: 5858 - protein, 170 aa, synthetic construct
  REGION 1..170: note = TnsF-Tn7 System Protein
MTQDQRIAWISELLSGDSETLPYRVAGVLILLYAQPLKSIVRLQTSSIIDGNPMAITFGKHPVDVPEPFAQLIRDVLAHRTNLRTSGHGNPWLFPGTHAGDHLHPDTIMHRLRLIGMSNLGARNSALDDLVLECPPSVVADALGYSHQVAFLHAERSGETWARYAGRRLR

SEQ ID NO: 5859 - protein, 192 aa, synthetic construct; identical to SEQ ID NO: 5857
  REGION 1..192: note = TnsF-Tn7 System Protein

SEQ ID NO: 5860 - protein, 381 aa, synthetic construct
  REGION 1..381: note = TnsF-Tn7 System Protein
MAGRKRHSAEDIVRKLRRADELAAEGKTGEAIAADLEVSAATLYNWRRQYGGMDGDAAKELKELREQNSRLKRLLADAELEKDALREIAKGKILSPTAKRAAIDMLKDVKNMSERIACRVVGLSRSAYRRLPQAHTPADPDAALREQLRTYARKHPRHGFRRAWAHLRFDDGIEINKKKVHRLWKEEGLQVRRAPRRKRAGQSSVPVVVADAPKVVWALDFQFDSTVDGKKIKIASMVDEHTRMSLLNIVDRSIPAERLIEELEKTFAIWGGPPMVLRMDNGPEFISEALQAFCAGSVGISYIPPGTPWNNGFIESFNNRLRDECLNRNCWPTLLEARVVIGDFKADHNHRHRHSALGYRTPAEYAAGCTHQHHPVGCEID

SEQ ID NO: 5861 - protein, 368 aa, synthetic construct
  REGION 1..368: note = TnsF-Tn7 System Protein
MRIDEVGRVHLVESVPLLRPEERVVELMLDGWRNQQLSRNLQFSTIDRRVRCVQRFIEHSNEEPWNWTPAMVEEFSADLRSVRHVMHSTLRGYHGTLRAFCSYISNPDYGWDRVCEQLFDAYPAQVFSAWNTASHVQEYDGRASKRPYTKDELQALFEYADDEVARIGATSRKGWQAAYRDAAMMKVAYAYGLRFNELTHLQLVDFARNPHAREFGKFGVCKVRYGKAFRGSPPKPRSVLTVWRWTPPIIEDWIANGRGDPDSLDLFSSERGGLVVGSTLLRRVRRYCVDLGIPDGVDLHSFRRSYATHLLEDGWDPRFVQDQMGHEHASTTGIYQFTSDEFRRSTLRSVLDRTVKEALDSTTKGTAE

SEQ ID NO: 5862 - protein, 110 aa, synthetic construct
  REGION 1..110: note = TnsF-Tn7 System Protein
MKRKVDYTWRLAELMAARGMNTTTDLIPLLAERDISLSRPQVYRLVNQRPERVSLQLMSALCDIFGCGPDALLTVTAVNAREHHRAANAGPNVMRLDRAVRPRRANILDE

SEQ ID NO: 5863 - protein, 226 aa, synthetic construct
  REGION 1..226: note = TnsF-Tn7 System Protein
MNQAHVDEYLAEGPSTRKHIRNLLHYLSKERTITGIDVPYRLAQTMPMLTQQQRIDHIKTLMSTGELAVSIRLFGLLFLLYGTPIGKLCMLTLDDVHTDPTGTAIRLGAQPAPLPDVFVPLLLAHLDELDRRTATNVDTNWLFPGTRAGRPRAPYTILPKLRQIGIEIQGARNTTLRTLVEELDPTSLSRMIGYSAITLDRHGNAATVPWSSYVTDKHPHLRKPHA

SEQ ID NO: 5864 - protein, 492 aa, synthetic construct
  REGION 1..492: note = TnsF-Tn7 System Protein
MPRPRKAEDPTRWPVPCSRCGQHHQTVANWPDGGVCGYCYQQAKRTRGTCACGHEGILPGLVDGAPACRHCSRVRLNVDCTSCGAEDELHSGGRCWSCTLADTVDGLLARPTCGTVAPELVPLATALKSMKRANSGLTWIRQEHVSAFLRRLAVAPSVTHEAFDGLPNSRTREYVRGLLVEYGVLPRRDELRARYDDWAQQALERVGDPENRELVRRYIRWHHQRRMNHADGVSHGTFLRSKQSVTVAIDFLNWLTDRGTRLAELQQAHLDAWQAEGPTTGEIADRFLNWAIKTHTAPAGLRMVPHKRGTSPRLSASQQEEAVQQVLQGDLLPARDRAAAILVIVFGQQIEHVAALTWDDVAVTDELVTVRLGGIEIALPAPLDAPWRDLASAPGNGLTAAHPNSNWVFRGLSPGRHISSAHLRQRLRAVFSARAARLGTLHELTRLAPVAIIAETLGYSPATIERHATDSAAAYSQYVATRPGKHATFQNG

SEQ ID NO: 5865 - protein, 492 aa, synthetic construct; identical to SEQ ID NO: 5864
  REGION 1..492: note = TnsF-Tn7 System Protein

SEQ ID NO: 5866 - protein, 780 aa, synthetic construct
  REGION 1..780: note = TnsF-Tn7 System Protein
MHAADSHDLIRVQGARENNLKDVSLDLPKRRLTVFTGVSGSGKSSLVFATIAAESQRMINETYSSFVQTFMPTMARPDVDLLEGLTTAIIVDQERMGANIRSTVGTVTDANAMLRMLFSRLGQPHIGSPQAFSFNVPSVTGAGAIKTADGKTEKRTFSVVGGMCPRCEGTGQISDFDLTALYDAGKTLSGGAILVPGYSMDGWYGRIFAGSGYFDMDKPVGKFTKAELNDLLYREPTKIKVEGINLTYEGLVPKIQKSMLSKDKEAMQPHIRAFVERAITFQTCPECGGTRLAEPARSSKIRGASIADLCAMQISDLAQWVRDLHEPTAAPLLKGLGELLDSFVAIGLGYLSLDRSSGTLSGGEAQRTKMIRHLGSSLTDVTYVFDEPTIGLHPHDIARMNELLLQLRDKGNTVLVVEHKPEAIAIADHVVDLGPGAGTAGGEICFEGTVEGLRGSATLTGKHLDDRARLKGSVRAPRGALEVRGASSHNLRDVDVDIPLGVLTVVTGVAGSGKSSLIHGSVAGRDGVVVIDQSAIKGSRRSNPATYTGVLEPIRKAFAKANGVRAALFSANSEGACPVCNGAGVIYTDLGFMDTVSTPCEECGGKRFQAAVLEYLLNGRNIAEVLAMPVEEAEAFFSEGEAKNPAAHRILERMADVGLGYLALGQPLTTLSGGERQRLKLATQMGEKGGIYVLDEPTTGLHLADVEQLLGLLDRLVDAGKSVIVIEHHQAVMAHADWIIDLGPGAGHDGGLVVFEGTPVQLVADRSTLTGEHLAKYVGA

SEQ ID NO: 5867 - protein, 780 aa, synthetic construct; identical to SEQ ID NO: 5866
  REGION 1..780: note = TnsF-Tn7 System Protein

SEQ ID NO: 5868 - protein, 374 aa, synthetic construct
  REGION 1..374: note = TnsF-Tn7 System Protein
MELLPGRIPDFLTDQDVGLLRAEDRVFEAMLDRWRAQMLARGLTTAFIRSSCRTVERFKDHANEYPWRWSAHHVDDFLSDQRGDARPLSLSTLRSYAGAIRAFCAYLTDSRYGWAALCERVFADVPTQVVFEWNSPRHTTDEAVPPRRRAFTKTELQAFFDAADDVVDTEFAKGSKRWLPAMRDSVAFKVAYAYGLRRRELAMLEDVDFGPNPHVPAFGAFGSLQVRWAKGTKGSGPRRRTVLTVPEFEWVVDLLRFWLSPEGRGRFATADRSQSLWPSERSASAAVRNFDRSFQSVRKLAGLPEELSLHALRHSYVTHLIEAGYDPLFVQQQVGHSYSSTTALYTSVSSDFKHRTIQRMIAARIGSPENEGRN

SEQ ID NO: 5869 - protein, 360 aa, synthetic construct
  REGION 1..360: note = TnsF-Tn7 System Protein
MIHWLQHSTSARLLATLAAEHTEITHQLLDGLTQDRNTCHVREPLVATGVLPRRQEILIHLELWLNDFADALPAHQARIVRPFAEWQVLRDARRRSARSRYTAGAATADRTDIRTAAKLLTWLDANQLDLSTLAQEDLDLWLTTHPTLRRGIRSFIRWTLARRLTSGIVLPKEAKTFASRFQTDEEHYDQLRRCLNDDSLPLEVRVVGALVRLYGLPVTRIVALTTDRFHKDKTGAYFTFDRNPVLLPPKLACLIEEQIERPVHVSMLGEPSWDGPRFLLPGRLTSRPRSAGGVHTLMKQHGLPNISARNTAMIEVVAELPPTVVSDLFGVGASTAHRWARFVQDDWADYLAASQEDGDG

SEQ ID NO: 5870 - protein, 379 aa, synthetic construct
  REGION 1..379: note = TnsF-Tn7 System Protein
MPSQLAPLAEALTPNPYTVLDWLSTSRSAALLAELAELAEHRSDLTHDVLDALPQTRVTRHVRAVLVTTGVLPPRQERLAQMNLWLDKALGHAPPPHRQVVRPFAEWGLLRHARRSAAHDRYSGSAARRDRSQVQAALDFLSWLDDEGLDLSSLAQEHLDRWLATRPARYDTLHAFIRWATARHLTGPLTLPSRPRSSASHFLTETAYEQQLRRCLNDETLQRELRIAGALICLYALPVSRIIELTTSRFHREGQGTAYLTFERHPVLLPPKLARLIEDQIIHRSTTNSLNHELGASDRYLLPGTVPGSPIDGGTLAKLLGEKGLPVRAARNTAMIEAVTSLPPIVVADLLGLHPATVGRWSDQANDSWASYLAARPKA

SEQ ID NO: 5871 - protein, 379 aa, synthetic construct; identical to SEQ ID NO: 5870
  REGION 1..379: note = TnsF-Tn7 System Protein

SEQ ID NO: 5872 - protein, 275 aa, synthetic construct
  REGION 1..275: note = TnsF-Tn7 System Protein
MDWLSKNTASAVLADLATGTRPLTHQALDEMPHSKPLEHLRSVLVATGALPARDEHLSRLERWIHATLDERGGRDDRELLRRYALWHLLRRLRQRNNGTPTTHSQFAGVRQRVRAAIALLDWLHAREVTLASCRQADIDTRLTSPDATHLAEAGQFVRWATAQRVCAIEYPAVRWHGPSRTLDHDERWKHAKRLLHDDSLRPEDRVAGLLLLLYAQWPSAISRLTVDDVDATDHQVRLRLGQTPITLPEPLASLTRTLIATRRGHAVLGEQGTSP

SEQ ID NO: 5873 - protein, 275 aa, synthetic construct; identical to SEQ ID NO: 5872
  REGION 1..275: note = TnsF-Tn7 System Protein

SEQ ID NO: 5874 - protein, 111 aa, synthetic construct
  REGION 1..111: note = TnsF-Tn7 System Protein
MSAKLDYRWHLRQVMAGRGMFQTTDLIEPLAQRGIALSSSQVYRLVMERPERLSLKILMALLDILDTTMEELIEPVADARSERKPKAKAVGAETGVCGLRPKRARITGVDS

SEQ ID NO: 5875 - protein, 491 aa, synthetic construct
  REGION 1..491: note = TnsF-Tn7 System Protein
MPRCKKPCARCGVVNGRYGVAKWPEGFVCGRCYYRAMQCHGACPACGVERLLPGLNTDRIPICRDCAGIPRDFHCTRCGEEADRGRRGLCHRCCLQDDLATLLDDGTGQIAPPLRPLVDALTTQDRPVSARLWTRFPHVKTLLRGLADGSLALDHETFDNFIPRHAAEHTRELLVTIGILAERNRAEVEFLRWLEWKTPQIANPEDQQLVRRFATWHHLRRLRELDARGAVAPTTVARARADVRAGADFLAWLRERDRSPMTCAQGHVDEWLATGTGTRRSAATFVHWAVRTRVMAPVDFPWIRSAKLDSIGQSERLHFLRRIAEDSSIRLETRVLGLLVLLFAQPVTRISRMSINDIEITDEEVIVHLTGGEPVPVPHPFDHLFRDYLPQRRHTTTARNNRTRWLFPGAVPGQPLAIATLHKGLWDSGIPIRRGRNSALRDLVLEMPPALVAKALGYSPLATELHAAEAGHPWAGYASIRRYRGKQLQIF

SEQ ID NO: 5876 - protein, 491 aa, synthetic construct; identical to SEQ ID NO: 5875
  REGION 1..491: note = TnsF-Tn7 System Protein

SEQ ID NO: 5877 - protein, 1292 aa, synthetic construct
  REGION 1..1292: note = TnsF-Tn7 System Protein
MHLKSLTLRGFKSFASATTLRFEPGITCVVGPNGSGKSNVVDALSWVMGEQGAKSLRGGKMEDVIFAGTTGRPPLGRAEVSLTIDNSDGVLPIEYAEVTITRIMFRNGGSEYQINGDTCRLLDIQELLSDSGIGREMHVIVGQGQLDSVLHADPMGRRAFIEEAAGVLKHRKRKEKALRKLDAMGANLARVQDLTDELRRQLKPLGRQAAVARRAAVIQADLRDARLRLLADDLVRLHTALRGEIADEAALKERRETAEAELRAALSREAELEDAVRRLTPRLQRAQQTWYELSQLAERVRGTISLADARVKSAAAPPEEERRGRDPQDMEREADRIREQEAELTAALEAAEHALEDTASHRSELERELAAEERRLKDAARALADRREGLARLTGQVNAARSRAGSAQSEIDRLAASRDEAQERAVTAQEEYEQLKAEVDGLDAGDAELGERHEAARSELKEAEGSLSAAREAATAAERKRAAVAARHDALALGLRRKDGTGVLLGARDRLAGLLGPAAELLTVAPGHEVAVAAALGAAADAVAVTDPATAAEAIRLLRKLDAGRAALLLAGGGGGADGGGGGGEVGAAPRGPDAVGQVPGQGSESHVAGQVPGQGSESHVAGQVPGQGSESHVAGQVPGQGSESHVAGQVPGQGSESVRPAAHDGTSPESAPASSIPQTSAALALDGRGCPAVADLVSGPVELLAAVRRLVRDMVVVGTLEDAEDLVAAHPELTAVTGEGDVLSAHFAHGGSAGAPSLLEVQASVDEAAAELAELAVRCAELAESQRLAAQRRGAVAALVEELGERRRAAEREKSGVAQQLGRLAGQARGAAGEAERMTASAVRAQEALEHATQEAEELAERLLVAEEASQDGADEEPDTAVRDRLAADGANARQTEMEARLQVRTHEERVKALAGRADSLDRGARAEREARARVEQRRARLRHEAAVASAVASGARQLLAHVEVSVVRAEQERVAAEASKGERERELAAERQQGRELKGELDKLTDSVHRGEVLGAEKRLRIEQLEAKALEELGVEPAGLAAEYGPDQLVPPSPAAEGEELPEDPEHPRNQPKPFVRAEQEKRLKSAERAYQQLGKVNPLALEEFSALEERHKFLSEQLEDLKKTRADLMTVIKEVDQRVEQVFTEAYRDTAREFEGVFSRLFPGGEGRLILTDPDNMLATGVDVEARPPGKKVKRLSLLSGGERSLTAVALLVSIFKARPSPFYVMDEVEAALDDTNLQRLIRIMEELQESSQLIVITHQKRTMEVADALYGVSMQGDGVSKVISQRLH

SEQ ID NO: 5878 - protein, 1292 aa, synthetic construct; identical to SEQ ID NO: 5877
  REGION 1..1292: note = TnsF-Tn7 System Protein

SEQ ID NO: 5879 - protein, 398 aa, synthetic construct
  REGION 1..398: note = TnsF-Tn7 System Protein
MEFVILAVVIALVAVGVISGLVVSSRKKKQLPPAPSSTPTITPPAEPHVGEEAETPRDESRRTIEEVGLPPAEAADEQAPEAVAVPALDVPEPTAGRLVRLRARLARSQNTLGKGLLTLLSRDNLDEDTWEEIEDTLLTADVGVAPTQELVERLRERVRILGTRTPEGLRSLLREELLTLLGTDFDRAVKTESGVDTPGVVMVVGVNGTGKTTTTGKLARVLVADGRSVVLGAADTFRAAAADQLQTWGERVGARTVRGPEGGDPASIAFDAVKEGIAEGADVVLIDTAGRLHTKTGLMDELGKVKRVVEKHGPLDEILLVLDATTGQNGLVQARVFAEVVDITGIVLTKLDGTAKGGIVIAVQRELGVPVKLIGLGEGPDDLAPFDPEAFVDALIGD

SEQ ID NO: 5880 - protein, 398 aa, synthetic construct; identical to SEQ ID NO: 5879
  REGION 1..398: note = TnsF-Tn7 System Protein

SEQ ID NO: 5881 - protein, 371 aa, synthetic construct
  REGION 1..371: note = TnsF-Tn7 System Protein
MAPIDGSAHLYLAAGVPLLRPEDQVFQAMLDGWRNQQLARNLSFGTVEQREALIRRFRAFTDADPWLWTAAHVDEFTTEARGVRRNSRSTVLGYQTGIRLFMGYLTDPAYGWSTECETRFGTHPVQVCHEWNTARHTQEAQAGPGKRALTHNELQALFDHADERAVAAQSSGRKGWLTAFRDATLLKVAYSWGLRRNEVRRLELCDLGSNPRAPEFGSYGIVHVRFGKAMRGSPPKRRAVLTVPLFDWATDALGQWVEEVRPLLAEADSPVLWPSERGSLLCLSSVTSLFTRCRHELGLAEGLDFHSLRRSYVSHLIEAGYDSLFVQQQVGHEHASTTTIYTHVSPDYRARTVRAALDRIGHRVAVGEVAP

SEQ ID NO: 5882 - protein, 446 aa, synthetic construct
  REGION 1..446: note = TnsF-Tn7 System Protein
MAQARSGTWRTPLCARCTNPDPDFWGRCPVCATTWQLSPRPCQRCVLEQRVRDLLGDATGTVRTDLSAFAQAVSAAARPDTTLAWLSGTKVHTLLERLGHDQRPLSHEVLDEFPASKTLDHLRSVLVATGALPARDERLVGLQRWITTTVAARTDPAQRRVLHGYAVWHHLRRLRQRLGEEHTNRAQDLNVRCHVTAAVNFLDWLAAHDAALDSCTQPLVEQWMANPKASYRDETGHFIRWSVQHRYATGLTYGTTRWTGPRGSLDTEQRWADARRLLHDDTLSIGDRVAGLLLLLYAQRTATITQLTVDHVHLTPDTVKITFGKSPIILAEPLAGLVRELVATRRGKARIGAPDDVPWLFPGKRPGRPLGDDRLGQRLQEIGLQPRQDRSTALLALATELPAAMLARMLGVHIKVAVQWQQAAAGDWAAYAADVSQRVDGDLSSR

SEQ ID NO: 5883 - protein, 446 aa, synthetic construct; identical to SEQ ID NO: 5882
  REGION 1..446: note = TnsF-Tn7 System Protein

SEQ ID NO: 5884 - protein, 1264 aa, synthetic construct
  REGION 1..1264: note = TnsF-Tn7 System Protein
MDELRSALRELHLGIGRPTYLRLQEIADQAGLTLPTSTIGTLLSGPGRPRLATVHTFVQVCARYAAGHKPRIELDPADIATLRWTRLHERVGPGRVTGSSERSVHDLTLSTHWDPRARGVERAARPGWFFTGRRAALVELSGWLTSAPPGQANVRIITGGPGSGKSGLLARLVTLSDAGYRRVNSPPIAADDPLQELSCGVIDVAVHARRKTTTAVIGEIAAGVTHSVDDVDQLIDALLARAAGAVIVVDAVDESAEPLGLARALRRVATETADIGVQLLIGTRPGGPRHRILQALGVSPPDGDPTVINLDDERYLAHADLAEYVRRRLLARGATESPELDMLAARIADSAHPSFLIAQLVTRSVTVQGDHGQRGSFPATVDQAMDEYLATAGTLAEQDRLEDLLRPLAYARGEGLPHDHAGIWPRLATALAMPGREYTSADVSGLLSGDADYLIETVVDEEATYYRLYHEALAERLRERDQPRPFEARHIVYEALQAAIPRDGEMQADWSIAHPYLRKCLPGHAAAADTLRPLLDDVGFLVHADPPSLAAALGPQHWLRPGAAQVYRHVLPWLHDCTTAERAAILLLAARTGGQERFADRLMNGRLRPAFTVPWAAVRSEPTSLTLGRHENWVTAVATGTLDGTPIALSGTHDGVIQGWDLLTGIALGPPIDAHKGPVNVLSIVAADQGMVLGVSGSWDRDIRVWDLQTWRPVGGPLQWHETAVNDVAIFRRDGAILAVSVSGGGLSREGRHGPDTIAFWDLPQQRLLASAESSAGQWMTAVDVCEIDGKWVAVTGGSSGIVEIWDLAPDRLTAAVLNRGQAAIVAIRIRHIDGRLIAIVVDEGQLSMWDVNRRSSISATDTPESGRLQALTTTVLDGRDVAITAQGGYESYLQLWDLSNGSAIGALPGDRPFWTSTVSALEIGDRHIAVSGGGDHSVRLWSLSLNSLAAADQPSELTSVTAVGVVGGRPVVATAGYWQAATGIIRILDLMTGGLACPPIHAHTRPITAMEFVDIDGRCTLVSGSDDHTMQFHDVATGRLRRSPVRMGSSTWITSIRQREMRGNRVLVVTGGWDGGDGDHAGLLKIWSVAKGRALKTMRDLDSQVKFSTILHVDGLQRLVSVTLRGVVTVWDLDDLTPVTSASNDRRLVWAAAALRGDATIAAVDDDGWVDLWDLRAGHSVAHWHSGQSAEITALAVVTIDGEEALASVARDGMLRITALSGVPLRAPIPLGAQPVSMQAVQETTLIIGLATGVLRMDLAAAD

SEQ ID NO: 5885 - protein, 1264 aa, synthetic construct; identical to SEQ ID NO: 5884
  REGION 1..1264: note = TnsF-Tn7 System Protein

SEQ ID NO: 5886 - protein, 349 aa, synthetic construct
  REGION 1..349: note = TnsF-Tn7 System Protein
MRKLFIDLTATGKPLSHEALDDAFLAGHHIATGHMRKILVAAGSLPPRDEHLAQIELRLGIVVAKYPQFETVLRTYVRWSVLPRLRRRARTRRPTDHITEWARARIHSAARFLAWSEEQGQALDTVTQEHVDDWLASGKSTQYNVRDFLVWAARRGYARKLLVPHRGKPDPAGLDEDVHWDVLQQCLHDDQLPLDVKVAGALVHLYAQPLSRIVALTSNDIRQHSGGNNRLLLDRQPVPLPPPLDTLVEQLATEYGRKDAGTWLFRGSYPGRPMPVSTLQRRLNIHGIRAKPSRVTACLNLAQDLPPAVLASITGMHVITAEQWHRRAAPDWGAYLAARRTATNSARSE

SEQ ID NO: 5887 - protein, 349 aa, synthetic construct; identical to SEQ ID NO: 5886
  REGION 1..349: note = TnsF-Tn7 System Protein

SEQ ID NO: 5888 - protein, 380 aa, synthetic construct
  REGION 1..380: note = TnsF-Tn7 System Protein
MRTVDLPGAMHLVRPTNVRALDPAPVMFEAMLEGWSRQQRSRLLAEKTVRDRLRLVRRFAEYTNTYPWQWTPEDVEAYFAAQFTKDPPAAHSTVRGQQNNLELFCVFITDSRYGWSAACLEEFGQFPVQVCHDWNTAAHVAEYEGRPGRRALTYDELQQLFNAADDRVERTKKLGRKGVLAAWRDSVMLKFVYAYGLRRREASMLDLADLRHNPRASDYGRFGALQVRWGKASRGSPPKRRTVLTVHELDWIVPLLEEWVDEARPRFSPGKHPALWVTERRSRLGVRRLDEVFNTIRKLAELPEELDLHSLRHSYVTHLIEFGYPERFVQDQVGHRHGSTTALYTWVSDEYRNRLLEAHLQRQQVRPSTRRPDTTMGSTR

SEQ ID NO: 5889 - protein, 95 aa, synthetic construct
  REGION 1..95: note = TnsF-Tn7 System Protein
MAAQDMFQTTELVPLLAERGIHLSREQVYRLVTQPPQRLSMDTLAALCDVLACTPNDLIEVVEVRQQVAKPTATGETAAAAPPTRRTQLRRPEGL

SEQ ID NO: 5890 - protein, 458 aa, synthetic construct
  REGION 1..458: note = TnsF-Tn7 System Protein
MRWPEGFVCRRCFQRATRHHGTCPACNTERLLPGLRDGEPVCAPCAGIDYDFTCTRCGAEDEHRRDHQCARCVLRDDLTALLDDGTGQPRAELVPLIGALCSQDRPRNAFIWLRNPDVTRILRALADGTTSLSHAGLDAEPVRATANHLDALLTQLHILPERDTTIAMFGRWLATRLPAYPPEHTQLLERFATWHHLRRMRQRADAGTLKPGAANSAKQEITVAAQFLAHLADHGATLHEATQGHIDTWLAPGPSTRYVARNFAHWAIRNHLMPDLDFPRRLAKTVPVLTQDERLTLLARALHDTTRSTTVRLAAVLLLLYAQPIARITQLTTGDVDLEAHPPTITFGDDPAVLPGPVAALARDHLTDRPNTHTTTGKSSPWLFVGYRPAHPLDPNYLMGKLRDAGIDLRGARNAALRQLVLDMPPAIAADTLGYAYTTTERHAREAGTTWAAYLSTR

SEQ ID NO: 5891 - protein, 458 aa, synthetic construct; identical to SEQ ID NO: 5890
  REGION 1..458: note = TnsF-Tn7 System Protein

SEQ ID NO: 5892 - protein, 211 aa, synthetic construct
  REGION 1..211: note = TnsF-Tn7 System Protein
MLEVRELAFSYRRGGDELFGGLSHTFAPGSFTAVTGPSGRGKSTLLYVLGLMLRPTRGDVLVDGQAAGRRDDPSRSRLRASGIGFVFQDSALDPARTVLDSVLEPALYAGRRRRDAEAPARDLLARFGVGDRADHRPGQISGGQAQRVAIARALVNDPPVVLADEPTGNLDRGNAEEVLHALRETTREGRVVVIATHDPFVLEHTDQVLAL

SEQ ID NO: 5893 - protein, 211 aa, synthetic construct; identical to SEQ ID NO: 5892
  REGION 1..211: note = TnsF-Tn7 System Protein

SEQ ID NO: 5894 - protein, 403 aa, synthetic construct
  REGION 1..403: note = TnsF-Tn7 System Protein
MSVVTSLPAAVQDVVWQAWGEGESLRRIADRAGVPSHHVRRYLLRHGGVRPALPRRSPRHLSPGEREEISRGIAAGLSARAIAEGLGRSASTVSREIARNGGRDAYRATVADERARVEARRSRVPRLASDERLRAVVLSRLELDWSPQQIAARLRREHPHEPGMWVSHETIYRAVYLPASRNLPKSTYQRLRSGRTMRRPRLVKRSHGRGHLRDMVSIHHRPATVTDRLEPGHWEGDLVMGKRPSAVATLVERTTRYLKIVPLPDGIKAKDVSIAVARALFNVPPGMCKSLTWDRGREMADHAFLSALIDAPVYFCDPRSPWQRGTNENTNRLLRQYLPRRTNMNATSNDELERIERLLNERPRQVLAWAAPTERFLETAAAARELRRSMSRSDAGVRAVAEE

SEQ ID NO: 5895 - protein, 158 aa, synthetic construct; identical to SEQ ID NO: 3237
  REGION 1..158: note = TnsF-Tn7 System Protein

SEQ ID NO: 5896 - protein, 158 aa, synthetic construct; identical to SEQ ID NO: 3237
  REGION 1..158: note = TnsF-Tn7 System Protein

SEQ ID NO: 5897 - protein, 362 aa, synthetic construct
  REGION 1..362: note = TnsF-Tn7 System Protein
MLPVVAGRVVRDPALTAFEAMLDGWRSQQLARGLAFSTISAREQVVRRFQGYCNEWPWAWTMVLADEWFTDLRVHRRVAHSTLRSVQGALRQFCWYVTDPAYGWATECEARFGTHPVQVVTEANAVAHVQANESRPAKRAFTHAELQDFLDHADEQVLRARTLGRKGWLAAYRDAVVFKIAYSYGLRRNEVRMLDVPDFGTNPHAPGFGAFGVAYVRHGKAMRGAPPKRRSVLTVWDWTSEVLAEWIHEIRPAYRPGPRDRALFPSERGERIGLSGLNRTFARYRRELGLSDGLDMHSLRRSYVTHLIESGFDALFVQQQVGHEHASTTSLYTCVSSDFRTRTLTRALNKTLDQLPSTLEER

SEQ ID NO: 5898 - protein, 105 aa, synthetic construct
  REGION 1..105: note = TnsF-Tn7 System Protein
MPTYRWRLRELMAAHGLFTTTALVPLLTERGIELSASQVHRLVTQTPERLNLTVLAALCDILECTPADLIPTDVQTQVEQVAVGVPVLDMAAVGRPRRARVRPDA

SEQ ID NO: 5899 - protein, 293 aa, synthetic construct
  REGION 1..293: note = TnsF-Tn7 System Protein
MQTESHHQIHGQPQDVLPKQALRRARHRLPARPFTPHAAGWARTRIRAALHLLAWIDAQQTTLADLTQADVDRWLTEQPTESAYPAREFLHWARSRHLTGDVTIPKRRPRHIVTAISEDDQWTHLRRCLHDTTLPLPARAAGALLLVYGLPVSRISTLHADQITTEGNRILLRLGAHGILLPPAVADLLLAQRDAARTVSVLARSAPPATTWLIPGGFPGRPARDAVYRTLRGNGLPHARHARSAALMTLAADLPAPILAALLDLHIATAVAWTQHAAHDWTLYLATRKPPDS

SEQ ID NO: 5900 - protein, 293 aa, synthetic construct; identical to SEQ ID NO: 5899
  REGION 1..293: note = TnsF-Tn7 System Protein

SEQ ID NO: 5901 - protein, 444 aa, synthetic construct
  REGION 1..444: note = TnsF-Tn7 System Protein
MFDFKSNPVNITKQNTVQDFTNSDFKALLVCPTCMHKVTTLVASIYGDICKPCHNNFFTLKHICGHCKELKRKTYRYRNSPIDAPLCQECYDKLIRRHTRGHCKGCRRNLKVSDDGYCKACLKGKVACKVCGAETFAGRESECINCSCKRLILTCAKFARLALPEGKLRDDYMDFMEYLTQPRIAYMAYAQKQYPKYLQFFIDCKNLWGEIPDYKTLVAHFKPNGLRTYLRVLRWLIQSNRIEEDLTLKKYYAASESIEKLKNKISDPPFELTQYITHLENKLKDNANIVRIRACMQPAVDLCVYNNLHKGDVIEAQYFDSYLKHRPAQKGNIWGFAIYLRDVFGRKIQLSVTDGKVKPRTRCKNTFAEKVLIRLVNKPTKLTLREKREWFRCGMWIFHKQKVKKDPKVMDTRELIKTSSDGQFECWRFNGQDFWLPKIPTKNG

SEQ ID NO: 5902 - protein, 227 aa, synthetic construct
  REGION 1..227: note = TnsF-Tn7 System Protein
MKFKQARKFKANHGSVTGYYPFCGELIPYESTLERDFIIRESFFVNTKTISAQPVTIEFQKNGRTHPYTPDFFVAYQTPNAYGRTGMFVEVKPKSEWRKHHKQWLCKWAAMKAFATKLNCSFRIYDEDRIRDFTLANINQLLRFKSMHVEPFMLEKVTRITSQAHAISINDLACSLEGSLHALHTGETGTKFDVYRIIWHALANRILDCDIANYDVMHGETKVWLAK

SEQ ID NO: 5903 - protein, 697 aa, synthetic construct
  REGION 1..697: note = TnsF-Tn7 System Protein
MARKITTAINETGGYTPNREQISFKEGQLYRHKQTGEEHLLLVLIDNHKAAFKTLKNLKTSVFSLDDFMPCTQQEDVSTIDLSQISDEQWKEAFKRYRVIDPLINQHRSQRPTLVEIAKKTGVHKRTIQRWLRDYSSTNSIVSLIPLKRGWQNGRRRLSKEIKALIDSVIKKFYLTPQKPSAEATVNAVYLEATRLGIPESKWPSSNAIRKSIDELDLAETLRARGQRRKAKALTTPKPGSFPTTNYPLEVVQIDHTPMDIIVVDDVSRQPIGRPFITVAIDIYSRILTGYYISLDAPSMTSVGMCLVRSILPKQDLLSEYNIHDMDWDVYGLPKKIHVDNGADFRSLSLQRSCAAYGIQIEYRPLARPEFGGHVERFIGHIMKRVHELSGTTFSNIQEKAEYDSEKHACMTMRELEHWFLTYVVKVYHQSVHSATNQTPANRWKIGIYGDRHQAGSGLPTMPTDNLTLTLDFLPMFDRTIQVTGVTIDGIRYYDPVLNAHINRANAKTGEKKKYIFRRDPRDISAIWFYDDSLQRYFKIPYADQSLPAMSIWEYEQIRKQVKKSKGVVNNRLIYTGWEEMQQIAEQAKKATNKARRSNQRKKLHKESQSYHKAEVMVDEQSYMVGSDGKIINSSDVANNVVSTVTGRKSKLKQAKPLFAKTAQKSQLDNADDNLGQSVAKYNNNRVARHYDDDDIM

SEQ ID NO: 5904 - protein, 444 aa, synthetic construct; identical to SEQ ID NO: 5901
  REGION 1..444: note = TnsF-Tn7 System Protein

SEQ ID NO: 5905 - protein, 391 aa, synthetic construct
  REGION 1..391: note = TnsF-Tn7 System Protein
MTQPSAKQPLLPLAIKPKLYPRESLYSWLIRAASYNGLPAPVFTNLYWTYKNRLLHIQLNKKYPNKTFKDEILQLCGKQPIVFADFLNVDDCNHTYFLLSHLYKRSGSAHGYQYCPKCIAEQQENAYLPIEWDMASHTVCTKHHILMQNSCTNCGKFYTPHKASLRPIEQCAYCGCSMAIINKDISTHPLYDKINIPRLLKLQQQINNYIDSSIHPQICADSHPNHTHSFYYLGMQLEFRDFLSLLVYFIKLARHHAGIPTHKENSIYNQFIKAMKWERYASGYKFVGVFNTLSAVERALLLSCACDFLDLSADNWVQITHELNIKQGYFSAVPDKDNLPEPLLRIIGNLPVTESKKRAKSHRPTEAGRSLKQVKTRWSQLLKKMDREFYV

SEQ ID NO: 5906 - protein, 301 aa, synthetic construct
  REGION 1..301: note = TnsF-Tn7 System Protein
MTNRKEMPAHLHPKFAHMAFMSNDERLLFMAEPRWLTYPVAKQVMGMLDFLLKVPTQSRMPNMLLIGESNNGKTALLNKFVDAHEPYLSADDKPVLPVVFVQAPATIGTSGKEIYMSLLNAYSAPYTHKYTALQLQDQLLHFVRWCQTRLIIIDEIHSILTGTSRQQRLVMNSLKHLCNELKIPFVLSGTIDAVQVLHTDPQHASRFDVVELPLWKLDEEYATMVASFERILPLKEPSFLDAADKLPMIHSISRGCLGDTKRLLVAAATSAIKNGRESITSKDIEENKWVSINRGERRLIL

SEQ ID NO: 5907 - protein, 301 aa, synthetic construct; identical to SEQ ID NO: 5906
  REGION 1..301: note = TnsF-Tn7 System Protein

SEQ ID NO: 5908 - protein, 364 aa, synthetic construct
  REGION 1..364: note = TnsF-Tn7 System Protein
MPNPVRGLVWIRNNPRVPEYLRGLADGTIPLTHEGLHELESWRTAAHLRDLLMDAGALPRIDRQIMLFERWYRQRLTQIDDPEHAQLLRQFTTWRLFPKLRAKAAREPLTSGSRNTAAGRFNIAAVFLTWLDDRGRRLDQTTQTDVDLWHARHRDPKRLDAFLNWAMDGRHMPRLQLPAPARNDRAPISQDRRLALLRRFLTDEDILLRTRVAACLVLLYAQPVSRLARLTIRDVLQHHGRVSLRLGDPPTPVPEPFATMLTTLVADRANMNTAANPDSDWLFPGGRAGQPLSPGAFLQQLRALGLPTTQTRTAAFQQLVLQAPAPVVAQALGYHHNTATKHRTAAGGTWNRYPTTREGTARWP

SEQ ID NO: 5909 - protein, 364 aa, synthetic construct; identical to SEQ ID NO: 5908
  REGION 1..364: note = TnsF-Tn7 System Protein

SEQ ID NO: 5910 - protein, 850 aa, synthetic construct
  REGION 1..850: note = TnsF-Tn7 System Protein
MTEIRVPDMGLVVLVGVTGSGKSHFARRHFKPTQVVSSDYCRGVVSDDENDQSATGDAFDLLHYIVAKRLRRGLLTVVDATNVQSKARQSLLQIAKDHDVRAVAIVLDVPEGVAAERNAARPDRDMPAHVIPRQRRELRRGMRTLEREFRRVHVLRGVAEIDAATVAYEKAWNDRRELTGPFDIVGDVHGCRAELEDLLTGLGYEIERDAAGRAAGANHPGGRTAVFVGDLVDRGPDSPGVLRLVMGMVAAGAALCVSGNHEAKLVRALRGRKVRRTHGLAESMEQLSAEAEDFRDGALRFMDGLISHYVLDGGRLVVAHAGLKEAYHGRASGRVRSFALYGETTGETDEYGLPVRYPWARDYRGKAMVVYGHTPVPEAEWVNNTICLDTGVVFGGKLTALRYPERELVSVPARKVWYEPVRPLDAPAGAGINHRENDVLNIEDVLGNQGVETRLMGRVAVREENALAALEVMSRFAVDPRWLVYLPPTMAPAATSSLPGYLEHPAEALAAYRDSGVVRVVCEEKHMGSRAVAVVCRDASVAARRFGVPDGTTGALYTRTGRSFFRDPSRTAEVLDRLRAAIGAAGLWDELDTGWLVIDAELMPWSAKAMDLIRTQYAATGAAARAALPMASGVLARADGRGLDLGDLRERIDRRAANAARFRDAYARYCWPVDGLNGLRLAPFQILAGEGRSWAAERDHGWHMAVAERLADNDPSGLVRRTASMTADLHSAESEAAVTGWWEKLTAGGGEGMVVKPLGPLPEDRRVQPGVKCRGPEYLRIIYGPDYAEPANLERLRGRSLGRKRSLAMREHALGVEALDRLTGGEPLWRVHQAVFAVLALESEPVDPRL

SEQ ID NO: 5911 - protein, 850 aa, synthetic construct; identical to SEQ ID NO: 5910
  REGION 1..850: note = TnsF-Tn7 System Protein

SEQ ID NO: 5912 - protein, 395 aa, synthetic construct
  REGION 1..395: note = TnsF-Tn7 System Protein
MRFFRIQRDGVGRGAVGADGLAPGSAKLHLVDGIALLRPDEQAFAGMLDGWRNQQLARRLAFSTVESRQRMVRAFTEHADAFPWDWTPQMVDDWMTDLRAVRNLRASTLRSYQLAVKLFCSYITDPAYGWPAECELHFGTHPVQVVHEWNAAVHVQDAEGDPTRRAFTRDELQAFFDHADEQVARIRGAGRKGWLPAFRDAALFKVAYAYGLRRNEVRMLDVADFGRNAHAAEFGEHGVCYIRYGKALKGSPPKPRSVLTVFDWAVDVLVEWTDHVRPLLGRDDSPALWPTERSDRLSLAPIDHRFATYRDALGLTGGLDFHSLRRSYITHLIEDGWDPFFVQQQAGHEHASTTSIYTCVSSNFRVRTLRNALDATISAALAPSAGRAAGKAGTR

SEQ ID NO: 5913 - protein, 109 aa, synthetic construct
  REGION 1..109: note = TnsF-Tn7 System Protein
MKRNVGYTWRLREIMAQHGMFRVNDLIPHLVDRGINLSSSQVHRLVTGTPERLSLPVLAALCDIFDLTPADLIVTTAENVVRKTATGDGGPVVDLAGMRPTRARIRPEK

SEQ ID NO: 5914 - protein, 247 aa, synthetic construct
  REGION 1..247: note = TnsF-Tn7 System Protein
MTWLAERGTALGDCRQADVDLWRAQHHQHARNALRAFLTWCASGNHIRSIELPKQPINQAQPLGQDQRTRLLGRLLTDEDIPLRTRVAGIIVLLYAQPLTRIVRLTVDDVVCNDDGVLLRLGEPPTPVPAAFAELLQRWISSRDNMNTATNRDSTWLFPGRKAGQPMNPDGLAAIVHQVGVTTAGRAAAIRQHLAETPAPVVADALHYHHKTTTRIASESGSDWSRYAAGDHTRSPTGWTPRRTLDS

SEQ ID NO: 5915 - protein, 264 aa, synthetic construct; identical to SEQ ID NO: 1484
  REGION 1..264: note = TnsF-Tn7 System Protein

SEQ ID NO: 5916 - protein, 673 aa, synthetic construct
  REGION 1..673: note = TnsF-Tn7 System Protein
MTTYVAEGTRSESRTVEKTAGTPPLHLAVVGQIAARLPELERATVQEIVSAMHGSTRRVIHDHLAEHADALVSGSSLAPPAVQRLIQTLADAGCGRVQAPLCHRCNRDRPLVQTVEGGRVCGGCAGALAYAASVGVCGECARTRPLPAQGLCSACYARGLTQRTPKTGCAQCGRHRVCRRSRTDGRSLCDTCRPRRPVPCSLCGTSAQAQACWPLGPVCGNCYARVRMNPAPCAACGQTRALIGRIDGAPACGPCSGATTDYSCTRCSNPADAMIGGLCEPCALDATAADYFAGLPAPAQEQLRPLRNRLLDGEHPRAARSWLKHSASARLLSEIVSSRERISHETLDTLCREPGQGQAVGYLRDVLVDAGVLAPRDEHIATVERRFTQLIGAHPQLATYLYAYGHGSVLPRLRNRERPSTEYVAEWATARMTVAAELLTWARDRGLALDELAQEHVDQWLGEGTSTRHNVRDFLVWAADDGRAQRLHVPHRDRPTPIGLEARSHWELLQRCLHDDHGLPLEVRVAGALVLFYGQQATRIVSLARDCLQHLGEDSYLLLGETPVMLPPALTRLVAELGAPDPQSATGGGTMSRWLFPNARNRMRHQSAASLTAVLNNHGITVKPARATALMNAAMDLPPAEFSAKLGIHLITAEQWRRRASRAWTAFITTAPA

SEQ ID NO: 5917 - protein, 673 aa, synthetic construct; identical to SEQ ID NO: 5916
  REGION 1..673: note = TnsF-Tn7 System Protein

SEQ ID NO: 5918 - protein, 796 aa, synthetic construct
  REGION 1..796: note = TnsF-Tn7 System Protein
MSRGPWVVREVPRPSGQAGTGSAPYDDPPPERVVTSLGADQDAVRRQGVERLIEYLPGLTLQQATDALKSASCDTPQRLKVLNEHLGEFPESLLTASSQVPTALVKLAYALRGHGRHDVALPICARCGEAKRRLASVDGTGGRLCERCAQGLVQKQPCAWCGRLQRVEARRPEGGICSRCHQADPSKHEPCATCGRTRRIAHRLTDGSGLCQACGPRRVYVCSGCGATAPAHKIGEQGPVCETCYRRPERPCGACGQTARIYHRATAHTPDLCDNCYQGIEAACTVCDRTRFCRRNRSTGDLVCDGCRPEPQQLCSFCHRTRRIRALWPAGAACRACYQTVRATPAPCTDCTTVRVLIGKTPAGDRICGPCAGVDIDYTCRACEQPGDFYVEGTCDRCLLKERIDDLLTGPDDTIDARLEPLHQALQAVPRPRSTLKWLKRCPAARLLVALAQQPDLINHDHLDRSPHTQAAHYLRGILVRTGVLAERDEHLERIGPWADRLLIEQPQHAHLIRPFTHWYLLPRARRRARQRPFTTYSAQTPRAQVRAALDLLNWIHDHDTTLDRIDQHDIDQWLSTGPSSRYHAALFLRWATSRHLTAPGAGLTVPMRRTKAPGPFLDPQQQTAQLHRCIHDTALPLDIRVAGALILLFGVPVSRITTLTTKDININDKSGPQLRLTLGNGPCPLATHTRRPHPATARRATRPGRRQPGSQSRHRSYSVLVPGMIAGRPSNPIALTCKLNRHGITAIAARNTARRALAEQLPASVLADLLGINVSTAISWARQTKTDWTTYIAER

SEQ ID NO: 5919 - protein, 796 aa, synthetic construct; identical to SEQ ID NO: 5918
  REGION 1..796: note = TnsF-Tn7 System Protein

SEQ ID NO: 5920 - protein, 520 aa, synthetic construct
  REGION 1..520: note = TnsF-Tn7 System Protein
MTDPAETSGTPGARRPRGRPRTSGDHRCDRCGRSAGKLRTRWPDGGICGTCYHDAVRTFGNCARCGHHRMLPGRAGDDELCRACARITTDLDCHRCGVEAEHYRRGGLCARCALRDDLTALFTHDPTDVVPVAASLIDVLCAAERPESIHTWKRRARVQQLLTGIGDGSLPATHEAFDRAGSGKDIEHLRDLLVHHGLLEPRDRDLALFERWLRARLDDAEPDWARRLLEQYATWHHLRAIRNRLSRGLPVRGSVHNAKQEIAEIGRLLIWLDEQEVTLATCPQGLLDRWLVDGPSTRYIVRTFIRWAGRQKLAPDLHVTRRTTRSSPSITEQTRLDWLVRCLRDEPGTRAYRVAAILLLLYAQPIVRIAALRRDQILSTPDGPAILLGAEPAALPSPFAELLLEHLANRPNMQTGNSDNPWVFPSIRAGRHIRPDTMMKQLRNLGIDLRGARNTALNELVQRVPAPIVATQLGYHPGVTQRHAEDASAPLGRYASLASLHSRWPGVRGDGTGDRRVPGR

SEQ ID NO: 5921 - protein, 520 aa, synthetic construct; identical to SEQ ID NO: 5920
  REGION 1..520: note = TnsF-Tn7 System Protein

SEQ ID NO: 5922 - protein, 368 aa, synthetic construct
  REGION 1..368: note = TnsF-Tn7 System Protein
MGQVVPLRGVAPRDRGDQVLGDMLTGWRHQQLSRNLSFTTIDSRARVVARFIEHCNEMPWAWTVSHVDEFFGDLRAEHNLSRSTVRAYQNGLRMFCDYLTDPRYGWDTICEQAFGTHPSQVVHDWNSAGHHQDNEQDPRKRAFTRDELQAFFDRADQEVTRIRELGRKGWLPAFRDAVLFKVAYAWGLRRNEVRHLQTVDFSRNPHAREFGRFGQLQVRYGKAHTGSAPKRRSVLTVRGWSAEVVEHWITNGLPLFGDGIDLFPTERGTLVSEAALGARFRRYRDELGLDDRLDMHSFRRSYVTHLLEDGVDAMFVQHQVGHEHASTTAIYSCVSSDYRTRTLRHALDTCLSEALLGRADTSREGRRR

SEQ ID NO: 5923 - protein, 114 aa, synthetic construct
  REGION 1..114: note = TnsF-Tn7 System Protein
MKRDVDYQWRLSELMARHGLHNSTDLAPLLRERCIDLSPSQVYRVVTQRPERISLKLVAALCDIFSCGPEDLITVTAADAKRGRRAAGDQHPVDPTVVKMNELRPLRARITGDD

SEQ ID NO: 5924 - protein, 395 aa, synthetic construct
  REGION 1..395: note = TnsF-Tn7 System Protein
MLSRRTRELMSGAGGSVPPALVALHDAIISSATPRKALNWLRQGAGAPILAAMAAGTMAMTHEALDAHPQTGAANYLRSMLVASGALEPRDEQLVGLEARNNRTVAEIERPEDRKIVAAFARWHVLRRLRRQAGRNATARTAIRHARIQVLGAVRLLDWLAANGLELKTATQGDVDRFLATGPPSCYDARHFVSWATERRLSAKLEVLSRRSHPGVVLDGEQRWVILRRLLNDPDIDLADKISGSFVLLYAQPLSRIAVMTLDQITVTPTGVAVRFASTELTVPGRLGALLAAHMATGRSRNVGIGAVPNSWLFPGHLPGRPITASYLGQRLGAFGIDARAARRATQQQLAGEVPAVVLAEMLGVTITTAVAWVHAAGGDWANYAALVTEDNAQC

SEQ ID NO: 5925 - protein, 395 aa, synthetic construct; identical to SEQ ID NO: 5924
  REGION 1..395: note = TnsF-Tn7 System Protein

SEQ ID NO: 5926 - protein, 365 aa, synthetic construct
  REGION 1..365: note = TnsF-Tn7 System Protein
MTGPVGLAGSARLVLVEGAALLHPEPAVFEAILAGWRQQQQSRLLAAPTVDSRDKTLRRFQTFTGEYPWRWGPVDIEQWSVSLRSAGRSGSTIRAYQNAVAMFCDFACDGRYGWVLECEQRFGEHPSQICHDWNTADHVADYEGDPARRPFSREELQGFFDYADERVAAARAHGRKGGLAAWRDTAMFKVTYAWGLRRREAAMLDTTDFSTNPAAPELGRFGMLSVRFGKAMRGSPPRRRNVATVMPWAVEVLQEYLSEVRPCYGSSSPALWLTERGGRISTRHINERFSAYREAMGFPSELTPHCLRHSYISHLVEDGVDPLFVQQQAGHSWASTTAIYTSVSNDYKNKMMRQALARAFEEEDR

SEQ ID NO: 5927 - protein, 109 aa, synthetic construct
  REGION 1..109: note = TnsF-Tn7 System Protein
MTRTVSYRWHLRQVMAQKNMFATTELGPLLAARGIVLSREQVYRLVTGTPERLNLATFAALCDILAVTPADLLEISAEPGRAVQSARATAPSPGGDLRPRRARIVRNQA

SEQ ID NO: 5928 - protein, 498 aa, synthetic construct
  REGION 1..498: note = TnsF-Tn7 System Protein
MTTNDLDSEPVCARCRRPVCTDHAKLNGDNRLRVRRRHWPEGPVCVACFEQAVNTYGRCGGCGTHRLLPGRAPDGTGLCTNCAGGLGDFTCRRCGQEGPSYRAGACARCVLADRLTELLDDGSGTVRAELMPLFHLIHGMNWPNSRLTWLRRPAPARVLTALARGEVPLTHHGLSQLQPWRSAIYIRDLLVECGVLPPVDRFLLLFEQWLPTWLETIDDPGHSRLLTRFGTWHVLRRLRHGPPVTSYRLNNARHTMRTAAQFLTYLAYDGRRIDGCTQADIDHWFASKPAQTGHATREFLQWCRRQRELPPLDSPPVMHTQAAPLGQQERIAFIRRVLTDHAIPPADRVLALLILLYAQPLIRIAGLTVDDVIRDDNQVLIRLGNPPTPVPEPFASVLTDYLDHRLNLNTAANANNRHLFPGRRAGQPLHTTSLRLRLRNLGLPSLDGRTATIRHLLRQAPAPVVAEMLGYNPRTATQIAAEAGTTWQRYAAGDHSRR

SEQ ID NO: 5929 - protein, 498 aa, synthetic construct; identical to SEQ ID NO: 5928
  REGION 1..498: note = TnsF-Tn7 System Protein

SEQ ID NO: 5930 - protein, 223 aa, synthetic construct
  REGION 1..223: note = TnsF-Tn7 System Protein
MPKIHVVVSQKGGVGKTTLAVNIAAIVSDVLGGNPEQPPVLVASIDPQASAVWWAERGDPDALPFDFDQLDDRPEEVAKLGDLHEYQHIFVDAPGSLARPTVLARALDVATDAIVPVIPEPLAYGPTERTVLDLIQPRDLPYRIVRNLWDRRDGHLDLDALTDWLDEQKLRYTNTIVRRYKMHTTAAAEGRVVTQYPNGRTATEARNDFLALALELGYGGTVA

SEQ ID NO: 5931 - protein, 223 aa, synthetic construct; identical to SEQ ID NO: 5930
  REGION 1..223: note = TnsF-Tn7 System Protein

SEQ ID NO: 5932 - protein, 377 aa, synthetic construct
  REGION 1..377: note = TnsF-Tn7 System Protein
MSDQRRLAGSAGLHLASGVPLLHPEEQVFTAMLDGWRNQQLARNLAHGTVEAQVRRVERFFKQVEVYPWLWTLQLVDEWFADLRAVNHCATSTVRGYQGAMRGFCNFIVDPAYGWAAECEKRFGTHPVQVITEANAAAHVEESETNPRKRAFTREELQALFDHADEEIARKRALGRKGWLSAFRDVTMFKICYGFGLRRNELRMLDAADFSRNPYGPEFGDYGVCQVRYGKARKGSPPKRRGVLCVWTWTAETLEQWFTEVRPLFERDNNPAAWPSERGLRVGCWQLHHRFATYREELGLDPVLDLHSLRRSYVTHLIEDGFDARFVQEQVGHDYASTLAIYTCVSSDYRTRTLRRVLDTTMAEALGTASTGEAPRR

SEQ ID NO: 5933 - protein, 112 aa, synthetic construct
  REGION 1..112: note = TnsF-Tn7 System Protein
MTKKRTVTYTWRLREVMAEHGMFHTTDLVEPLRERGIHLSVSQVHRLVTSVPERLSLQVLAALCDIFATDPAELVSTSAENVGVRKVTAGDRPAPADIAALRPKRARITPTE

SEQ ID NO: 5934 - protein, 442 aa, synthetic construct
  REGION 1..442: note = TnsF-Tn7 System Protein
MLVGQDGEGRDICGPCSGSDITFSCVRCGFPGDIYAAGCCTRCVVKDRVHDLLAQDDGMVTPQLLPLAQCLTEAEHPRSIRGWLSRSPAAKLLAALVSQHAEITHEHLDSLPQDPNLRYIRELLVTAKILPRRHETFARLELWAAKILAARPPHQLPVLRPFVEWQILRDARRRSVRGQYTAGAASADRLDIRSAIDFVNWLDEQALELKDVGQADIDLWLEQVKPSRRDGINPFLRWTAARRLTTTLSAPRQPSELPSRFLAEDEQAQQLRRCLNDDTLPLAIRIIGALIRLYGLPTTRIVAFTTDLFHREDDGAYFTFGRHPVLLPPKLARLIENQIAEPRIASAFRSPTVEDTPAYLFPGQPPSRPRSANSVHQLMKKYDLPIIEARNTAMIEAASNLPPIVISDLFGVGATTAETWAKYVQDSWADYLAAVEETQEEE

SEQ ID NO: 5935 - protein, 442 aa, synthetic construct; identical to SEQ ID NO: 5934
  REGION 1..442: note = TnsF-Tn7 System Protein

SEQ ID NO: 5936 - protein, 540 aa, synthetic construct
  REGION 1..540: note = TnsF-Tn7 System Protein
MGFARTCSVALAGIEGVVVEVQADLEPGIAAFTLVGLPDKSLVESRDRVRAAVVNSGAEWPQKKLTVGLSPASVPKSGSGFDLAVACAVLGAAERIDPRRIADLMMIGELGLDGRVRPVRGVLPAVLAAAEAGYEQVVVPEQTAAEAALVPGVAVLGVRSLRQLIAVLAGEAVPEEEPREAGRPDPMLAGLALPGSGAAAGLASRPADGGGPLPDLADVAGQRAARTALEVAAAGGHHLYLKGPPGAGKTMLAERLPALLPPLTRRESLEVTAVHSVAGVLPPGKPLIDTPPYCAPHHSATMPSLVGGGNGLPRPGAVTLAHRGVLFLDEAAEFSGRVLDALRQPLESGHVVVARSAGVVRLPARFLLVLAANPCPCGRHSLSGAGCECPPAVVRRYRARLSGPLMDRVDLRVGVEPVGRRALLEGTAGGEPTAVVAGRVLQARERASVRLAESPWRLNGEVPGHELRTRWRPEPGALREAERDMERGLLTARGLDRVLRVAWTVADLAGHDRPAAADVGLALQLRTGVSRGAVPVGEPV

SEQ ID NO: 5937 - protein, 540 aa, synthetic construct; identical to SEQ ID NO: 5936
  REGION 1..540: note = TnsF-Tn7 System Protein

SEQ ID NO: 5938 - protein, 371 aa, synthetic construct
  REGION 1..371: note = TnsF-Tn7 System Protein
MGSVAPGSAHLVLARNVVHLDPAPAVFKAMVEGWARQQSARFLKPKTIDPRLRLIERLEEFTGQYPWQWTPADGEAFIAHLRGGRKPIQMSTARTYEVTISLFMEYLLDARYGWLQACLERFGDTPQEIFHEGNSVLHTVEYEGDPRRRPLTYDEVQALFDAADARVGKIRGQGRKGALCALRDAAVLKTIYAYGVRRTEASRLDLVDLRRNHKAARFGSFGSVMVRFGKSTKGSPPKRRTVLTVPEMDWVVDVLKDWRDEIRPQFSPGRHPALWITERAGRLSPRSINDAFVAARRDADLDEDLDLHCLRHSNITHLTEFGYPARFVQEQAGHSHASTTAIYMGVSNEYRNKLLEKSMRNRLGDDWDVTP

SEQ ID NO: 5939 - protein, 110 aa, synthetic construct
  REGION 1..110: note = TnsF-Tn7 System Protein
MIKKMGYQWQLRQLMAKRQMFQTSDLVPLLAERGVKLSREQVYRLVTQPPQRMSMDTLVALCDILDCTPNDLIKPEVVNLQIRKTAGGDAAPASAPTEARRTVIRRPGQP

SEQ ID NO: 5940 - protein, 325 aa, synthetic construct
  REGION 1..325: note = TnsF-Tn7 System Protein
MNTGVLGARAEDLDSVEPWVEHLLAGKPPHIAALVRPYVSWSVLRRVRSRAARTRVTRSVRKYARARIGLAVQFLTWLDARGQVLATATQADVDVWLAGGTTTHYRLRDFLRWAHARRLCGDVTIPWLGRDGLPEHVLSQDDRWGLLRRCLQDEGVALHLRVAGALVLLYGQVPSRIVELTRDHLTVNGSGTYLAFGRQPVLLPPPRSPRSSGNSPTRQHPDGVPSSTRTPAPGCSPVPSPEPISIPAVWPRSSTTGSASSSAPPAAGRSANSPPTCPLLSWPNSSDCRSQPRRGGRPWPGATGPTTWPPAPPIMTADCQTCPLR

SEQ ID NO: 5941 - protein, 470 aa, synthetic construct
  REGION 1..470: note = TnsF-Tn7 System Protein
MVVAVRAWPEGPICSGCYATACETYGTCPGCGTDRLLPGRDAQARPVCTDCAGGIGNFTCTRCRLEGWNHYKGVCGRCVLRERLTPALHDGTGKVNPDLVPLLEHLCAMGRPRTGLLWLTKPHTMRLLRALAEGQVPLTHEGLAALQPYKAVAHLRQLLIAAGVLPDLDTTLRRIQEWTTAFLVAIPDADDRRTVEQYFRWQLQRRLHQAAARSRLHAYRDQGNRYLLRQALEFLAWLRDQDQSLHTLGQADLDRWVTVATVGQRAAVGTFLRWAARTGRAPGLRIPPQHHPEGIPLRQSERLSWLHRAATDDRLDGLDRVALTLLLLYAQPIPRITRLTTQDIRRDRTGHLEIRLGQPPAPVPAPFDQVLLDYLEKSRRATAANPDCPWLFPGRHGTLPLHPTSLRLRLATLGLQPRAARSLTLRQLVAEAPPAIIGEMLGYRTSTTERHAKQAGTAWSRYAALRINQG

SEQ ID NO: 5942 - protein, 470 aa, synthetic construct; identical to SEQ ID NO: 5941
  REGION 1..470: note = TnsF-Tn7 System Protein

SEQ ID NO: 5943 - protein, 1940 aa, synthetic construct
  REGION 1..1940: note = TnsF-Tn7 System Protein
MSIHKLTAGSGYDYLTRQVAAQDVTEKGHTGLASYYTAKGEAPGEWVGSGMAGIEGLSVGDAVTAEQMQALFGSGHHPLAQQRRDELQGPAVTDQNLRAATRLGVPYKVYSGDVSAFRLEVAQRIAELSLSRGISGRAVRDVAVSVEERARIRTEVAVEFFRTEHGRDPDDAREIAATIAKHSRPRTTAVAGYDLTFSPVKSVSTLWAIADPATAARIERAHQAAVKDALRFLEEHALFTRLGTNGVRQVNVQGMVATAFTHRDSRAGDPDLHTHVAVANKVQTDDGRWLSIDGRVLYKANVSASEQYNTSLEKHLRADLGLRFEERPNLDARKRPVREVVGVDPHLNERWSARRASIEARRAVLAQQFQSAHGRPPTEVESIQLAQQATLETREAKKEPRSLAEQRQVWHEQALEVIGGEDAIASMVQAAMAPPAGAATRVDSAWMEATAEQIVTTLEARRSTWQVWHVRAEALRRARAADLTVDDVDRVVGLLVDEALSEHSVRLSPDGDGVSEPAQLRRRDDESVYTVHGAEHYTSARVFAAEQRIVAAAARGGGRSVSVEAVDLALLESAANGVTLNAGQVALVRGMATSGTRLQLAIAPAGAGKTTAMRALARAWENGGGVLIGLAPSAAAAAALRDQIDDDGSVYTDTLAKLTHDLAEGDLSDWAAQIGPDTLVVIDEAGMADTLSLDTAVEWITSRGASVRLIGDDQQLAAIGAGGVLRDLDVTHGALRLTELMRFTDPAEGAASLALRDGQPDALGFYLDNSRVHVGDLATMNEDVFTAWETDRAAGLDAIMLAPTRDLVSDLNQRARAHRLEQAHGPEGPGMSVPLADGNQASVGDLVITRANDRRLRVTASDWVKNGDRWTVLSVDARGAGTGAMTVQHTRSGRVIDLPADYVATSTELGYAATVHTAQGVSVDTVHGLATGGESRQQLYTMLTRGRLANHVYLEVVSDGDPHNAIRPDSITPPTATDLLERVLARDDSPLSATTLARQAGAPATRLGDAATRYTDALYVAAEDLLDRATLDGLESAAEALVPGLTTEAAWPTLRAHLILLAATGPDPSHALAQAVDGRELDTAGDRAAVLDWRLDDTGLRNAGRGPLPWIPAIPTGLDEHPQWGPYLRQRADLVTDLAEQVRVDAESAPTPTWVSQGAARPDPTTLGQVAVWRAAMQVEEEDRRPTGAPQLQKAPARWQRRLNTAVSGDRTPALQEWGDLLRQVAPAAARDDFAPLLAERLAAMSRAGLNTRPLLATALRHGSLPDDHAAAALWWRLSRHIAPAVAQEIDRGHTLTSDWVPALAAKIGDGSVEQMRASSWWPALVSSIDHALQRGWPLEQLMGLAVNDGSDLDPAQALVWRLSVLTDPPPTDEDVDFPHPDDAAPADLWDVDLGEPHPMAPEAWGSARVPVDTDLAARRGTLEVLDDEFGEEPALGEELELSIDGQLQLEAILRSGMCPLAPSDADVELQVTRAADLDFAPVPATRMLEVNRLALAYFADRYQGSWAQEYLTDRLGVDPDGTPGLRPGYAPAGWVSLVTHLRRLGVTDEEMIETGVATRARTGRLIDRFRDRAVMPILHQGEVLAFVGRRHPALGDDDNAGPKYLNTADTPLFHKGAQVFGLAPELPVADATLVLVEGPLDAWAVTIATGGSHVGLAPLGTSLTDEQASQIAHLGRPVVVATDADLAGRVAAERDYWLLTQHALDPAAATFPDGLDPADVLARDGAPALEAALSTASPLGDVLLEERLRNLANADALHEAALVVAARPAADWNGQIDGVAARLGIPSARARSRLAAGVQAWNRDPRAAARARLDAIADVKARLTLATQGTPPDRWTALAAEVDPRLTAQADWPALAAMMQLAHQDGHDVPATVRRLVAAEPLTDLPAQELRYRLVAELPIDVAPTTMPATPGPPRPGVREEDRRAMTDKSRQRARPPRR

SEQ ID NO: 5944 - protein, 1940 aa, synthetic construct; identical to SEQ ID NO: 5943
  REGION 1..1940: note = TnsF-Tn7 System Protein

SEQ ID NO: 5945 - protein, 738 aa, synthetic construct
  REGION 1..738: note = TnsF-Tn7 System Protein
MVDPTTSLKRLIGSAAPPLEKARGLRTVEDLLGFWPRRYTPYDSDLSTLREGEYAVVVARVRTANARPMKYRKGRILTVVAAGERGGELDITFFKPHGHEDRLVPGVRAVFAGQVSSFNGRMQLTHPGYELLDEGEDVDRGELVPIYTRVPRLQNWTIMRSVETVLDALDELPDPIPAPVRAARDLPSRLVATRMLHQPRTRGGVEAGRRRMRYEEAFVLQSALAMRRLDGSREATAPRVARPGGLLEAFDARMPFELTEGQRAVGEQIAADLARDVPMHRLLQGEVGSGKTVVALRAMLAVVDSGAQAAILAPTEVLAAQHHRSITTMLGDLAEGGLLGGSDIGTRVALLTGSQSTKARRAALLQAASGEAGLVVGTHALLEASVQFAELGLVVVDEQHRFGVEQRDVLRSKAQQPPHVLVMTATPIPRTVAMTVFGDMETSTLRELPRGRAPITTHVVPEHLPGWMPRTWQRVAEEVAGGGRVYVVCPRIHEDDGAADGADGADLVEEGPPPDADDEPEQWEAPGAEDRPARPPLKSVLRVAAELAENPDLRGVRLGVLHGQLPPEEKEAVMGAFARGDLDVLVSTTVIEVGVDVPEATAMVILDADRFGVSQLHQLRGRVGRGGRPGLCLLVTGTDNEQTRERLEAVAATTDGFRLARLDLTLRREGDILGARQSGGRGSLRFLSLLRDEELVVMAHEDAFAVVAQDPSLAAHPDLAVAVAERLDEEQAAYLERS

SEQ ID NO: 5946 - protein, 738 aa, synthetic construct; identical to SEQ ID NO: 5945
  REGION 1..738: note = TnsF-Tn7 System Protein

SEQ ID NO: 5947 - protein, 379 aa, synthetic construct
  REGION 1..379: note = TnsF-Tn7 System Protein
MADRRERPAGAALTLLADGVGLLHPDARVLEAMLTGWEQQMLARNLAPTTIRTRTRQVRALVAHANESPWCWTMATADEWFADLRSVKHCSLSTIRGLQVTIRGFCDYLIDPAYEWATVCQERFGVTPVQIINEANAAAHVADYEGQPTRRAFTRSELVMLLEHVDARASTRQGLGVKGWASVFRDSVILKVAYGYGTRRNETRMLDLTDFSANPHAPEFGSYGVLNVRYGKAQRGSPPKRRSVLTVWPWTVDVLRQWVVEVRPLFEHATGPALFPSERGDRVGAGTLDHRLRGYCGELGLDPALSFHSLRRSYVTHLFEDNWDPRFVQEQVGHEHASTTSLYTCVSSDFRVRTLRKVLNNTAAAALALGPDTSTGGDH

SEQ ID NO: 5948 - protein, 121 aa, synthetic construct
  REGION 1..121: note = TnsF-Tn7 System Protein
MAQFWQVTYTWRLREVMAANGMYATSDIIGHLAEHGITMSTSQAHRLVTGTPDRLNLTVLAALCHILGVTTDELIDTNTHLVGVKPRAIGDTERHPRRARNGPVIRPVRAVITPPPGADDQ

SEQ ID NO: 5949 - protein, 354 aa, synthetic construct
  REGION 1..354: note = TnsF-Tn7 System Protein
MAADGHYLLQLIKSRKTWRVLSTVVSLPDTARHEDLDQLGAARSVNQVRSLLVDLGALPERDEYLHRLQKWTTDQIAAIPHSADQLALQQFVRWCHQRRPRKGPTTNTQAANDKRELRLIFSLLSHLNAAEQTASTATQEHLDAWAVNAPRDAFRVRGFIRWCAKTGTNRFLTPPDYPRLSFRIGGSLGPGNESALQSALSDQNHDPRMALALLLNVVYGIRVHRIVALQLADLSITDGIASIQLGSVRLDLPAAATAWVDVILAGRIDKRRFGGAAHDETWIFPGYRHGNHQLASSLAARLRKLGVEPAVAHQASSAAIITQVPPAVAARILGISITTASNWHKLTGNAVTPR

SEQ ID NO: 5950 - protein, 378 aa, synthetic construct
  REGION 1..378: note = TnsF-Tn7 System Protein
MIWALDGKFRVGVGHPFGLSAVHLVEGVAFIKEDSSVFEAMLDGWHAQQSGGRRLQKKTVEDRLLMVRRFQAHSGVWPWEWTAAVFDEWMTDLVSIRKLTAATIRGYQIAIRQFCDFICSPHYGWVQQCEERFGTHPVQICHEWNTRPHVQEYEGDPHRRPLTRPELQLLFDRADEEVQLRLSAGRKGAAAAYRDATLLKVVYAWGLRANEAVRLDVTDMYRNPKVSAFGDYGFVRVRHGKASKGSPPKPRTVTTVMPWAVDSLRDYVENVLPLMRAGSSTALWFSERSGRLSARSLSDRFALYRDELGLDRQLSPHCLRHSYATHLTEDGHDPLFIQRQLGHAYQSTTGIYTHVSEDFANHILNEALTKIPTFATLK

SEQ ID NO: 5951 - protein, 114 aa, synthetic construct
  REGION 1..114: note = TnsF-Tn7 System Protein
MGKIIGYEWRLREQLAAAGKFSTTKLIPLLEERGVHLSASQVYRLVAERPERLNLHVLMALTDILGCSADDLIVKVDLGQAQKDKAVGEQGKADPASAVIRSRALRPRPARITE

SEQ ID NO: 5952 - protein, 171 aa, synthetic construct
  REGION 1..171: note = TnsF-Tn7 System Protein
MPESTPPSRFCSGSQWLNSREVALADANQELVDEWLDGGRSTRRNVEDFLIWAHRRRLAPRLEAPKWPRQDPDLSVTDDERWAQFERCLHDSEMPLDVRGAGALTLLYGLPLSRIVEIRAGDLVADDQGRFLMLNGHPLPLPPALAILLDQLASDLISPSVVGRVGGTHLP

SEQ ID NO: 5953 - protein, 107 aa, synthetic construct
  REGION 1..107: note = TnsF-Tn7 System Protein
MIRKMSIEWNLRLRMAERGLFSTSDLVPLLAERGVVLSREQVYRLVTQTPQRLSMDALAALCDILSCTPNDLIAVQEVNAQVAKTAGGERPGAPTVRRSTIRRPDIR

SEQ ID NO: 5954 - protein, 304 aa, synthetic construct
  REGION 1..304: note = TnsF-Tn7 System Protein
MALSGSWLEHTLDGRPASHAALARPFVHWFLLHRARRRASSRRHTVSSETRIRHEVRSALALMTWLDEQACRVEDLDQDLIDRRLDERPGRGALIRSFLIWTAARKLTPRLNAPRHVQQEPDDLLPEDERWRLLKRCLTDETLPRDVRAAGGLLLLFGLTTARSRHLTDEDLEERGSDTYLRLGRHPLPLPPQPAVLLHGLAERPMAKTMIPHSRTGPRLPFPGRLSDQPIRRDTLTAKLAHHGIGARPARNAALAGLANEPPAAIIAGFLGMHPNTAVRWSRFVGSDWTDYIKARPEDAGIKE

SEQ ID NO: 5955 - protein, 486 aa, synthetic construct
  REGION 1..486: note = TnsF-Tn7 System Protein
MQSGPADQHQSWRGELLQHLLAATGRREEAVRGMRQRSTRSHPHRRWTALPGMRTRQGRAVRALRTHEAGEGEIHWRSDLRSVLLHHPQHHRACPRCNTVTLVASVADDGTLACSSCAGRVSSFVCVECGSEGIRHGKRCYPCAARLAVNELFADGTPARRVALEPLRVRLVHHPEPKSMVLWPKRSASAGILAQILREEIALTHEALDAHLVTQAASLLRYALVDVGALSPRDDGWAGFNLWLDRFLRSQSDEISQLLNPFCRWDVTARTRLMIRRNGLTDGTFDRARGICRSAQRFLAHLHAQNIALLDAPQSVLDYYLQDHPRERESLRNFLRWAAESGHATRITPVPAKWADPSTSYPMHTYREWMNRFETEESIPLRARICGLIAGTTGRPSSTTAKLTRSMIDDTGERMTIQIGRSPFQLRNPLPALIRRQLDEPRRWDTQSDWLFPSKLRAAHTPITAASSTTCRSWAAASSRCEEQRW

SEQ ID NO: 5956 - protein, 547 aa, synthetic construct
  REGION 1..547: note = TnsF-Tn7 System Protein
MLKHVPRRCVLTLELAPPSTPVSRERQRAEQVAKLLLGESSKVDITTDPDSGEVRRVQVKHDMGPRLAIPIRRMQVEKVISSMLPGRWRAHWDLEGDEVTFEIRPPMPDMVLHEPAPSTKQLTHSEYKSFKIPIGVDEDGSMQCWQPSVSPHMLVIGGTGSGKTSFQHTVLTHLAQARWRVWVLDGKRIEFAGFRTWPNVELVAARVEHQVRMLHAAHELMEQRYTQLERGTARLEDFEPLALIIDEYATFKARVQRWYKTVKPKGAPTQAPVLELLSDLARLARSAKIHMLLGIQRPDVEFLGGEMRDNFGARLSLGRLSPQGAMMMWDSPAIGVALPRNKRGRGVTLSADSLPVEIQAAYTPDPAKLDKSDAADWEHLRSLTPAETDHPRKMITEASPLISGDDEIPPTYDDWVGTRITLFDGIEDSVVVTPPVVLPSNVVALGARKASVRFEPVPEPDDVESAADVDEGGYGEICEGAAGELEVGDLVLTDPSLDLWVVVESVEPDIVDDDALAIEYRELESGDEGLMTVADNEVLTYRHPEAA

SEQ ID NO: 5957 - protein, 547 aa, synthetic construct; identical to SEQ ID NO: 5956
  REGION 1..547: note = TnsF-Tn7 System Protein

SEQ ID NO: 5958 - protein, 486 aa, synthetic construct; identical to SEQ ID NO: 5955
  REGION 1..486: note = TnsF-Tn7 System Protein

SEQ ID NO: 5959 - protein, 333 aa, synthetic construct
  REGION 1..333: note = TnsF-Tn7 System Protein
MTHANAPLTPEGRRRLALLITQDGWSLRRAAERFQCSPATAKRWVDRCRAGLPLTDRSSRPRRSPSQLPRKTERRIVALRLTRRWGPHRIAYHLGLHRSTVGRVLARYGMPKLTHVDQATGLPVRKSTPKRYEVASPGQLVHVDIKKQGRIPDGGGWRVHGRGSAQDRAAGVVRGKATRAGGAESRGYRYLHHAVDDNSRVAYSEILDDERKETAAGFWTRANAFFASLGVTVTAVMTDNGACYRSHAFAAALGETIKHKWTRPYRPQTNGKVERFNRTLAVEWAYARPYASESERAAAYETWLHHYNHHRPHTGIGGKTPSERVHNLTGKYS

SEQ ID NO: 5960 - protein, 351 aa, synthetic construct
  REGION 1..351: note = TnsF-Tn7 System Protein
MLDPARTTFQDMLQGFAVSMRSRGLAASTIEVREWGVRRFQNFAGEYPWTWKPQDIEDYTSSLLSGRRPLAHSTIRGYQHAIKSFCGYLSNPAYDWHEICLERFGEVPTQICHPWNTFAHLAEFEARPTRRPFGYDELEAFFAHADQLAHDLLDSRKKGALPALRDAQFFKTVYAFGLRRREAVMVDLNDLRPNPFMPDWGPYGKVQVRYGKAMKGSPPRRRTVLACPEFAWATEGLKHWVEVVRPRLDPGNHAALWLSERHDRMTTRNVDVRFAKIRTGAGLDPALTLHSLRHSYVTHLIEFGYAERFVQEQVGHHHSSTTAIYTSVSDDYKNRIFQEALTRVLGKEAIA

SEQ ID NO: 5961 - protein, 107 aa, synthetic construct
  REGION 1..107: note = TnsF-Tn7 System Protein
MTRKLEWHLRRRLAEQGLYKTTELVPLLAERGVSLSREQVYRLVTSPPQRLNMEVLDALCEILACTPNDLITFEEVAVKQVKTAGGVVTGIGSLRPVPAQIKRPGKE

SEQ ID NO: 5962 - protein, 470 aa, synthetic construct
  REGION 1..470: note = TnsF-Tn7 System Protein
MTNGLRVNWPGERLCHSCFYTAMRSRGSCPNCGHDGVLPGRLNRTDPRPVCLVCAGITNDYRCRTCGFDGEIYRAGECVRCVLRDELCRILLHHPADVAAMQKLVEVLCGVDRPESIMTWKRNLKVLQLLDGLSSGSIPLTHEGLDGTGHGRHVSHMRSILQHHGLLPPRDEHLARFESWLATKLDHIASPAVRGPVEQFATWHHLRRLRSNSRPGQGSDGPKRSAKQEITETIKFLTWLQATHDRTAADCTQQDIDEYLAAGPTTRHLIRTFFVWAKVSKINTGVKIGFRQAKSTPTITQDQRLAWLKELLTGDSESLPYRIAGILVLLYAQPLTKIAALHTADISCVNAEARIALGKDPIPVPEPFASQLNYHLHNRPNMRTAGGTRGTPWLFPSHHPGQHLNPQSIMFRLRDLGINLQGARNTAMQQLVSEVPAPLVAEMLGYSYQVAHLHAQQATQPWARYAAERP

SEQ ID NO: 5963 - protein, 470 aa, synthetic construct; identical to SEQ ID NO: 5962
  REGION 1..470: note = TnsF-Tn7 System Protein

SEQ ID NO: 5964 - protein, 246 aa, synthetic construct
  REGION 1..246: note = TnsF-Tn7 System Protein
MLTSVVSAWPVGAGVVELEFDTRDGSLCLPLARCATFPFELDCLPVRNFPSYRGQRNFPGLWWFSRTGIHVGHESWLERDQLMALDADPDVIGVVSQPFWFRWADGVSHAPDYFVRRRDGSALVLDVRDDGRIEAADQEKFDRSAAECAAVGWDCRRVGVLDPVLRANLRWLSGYRHPRVFRPGLADDLMSAFGRARPLMAGVLAVGTPLVVLPVLFHLLWHRKLSVDLAATTLTDDTIVSPSTGW

SEQ ID NO: 5965 - protein, 344 aa, synthetic construct
  REGION 1..344: note = TnsF-Tn7 System Protein
MAIVTESEIAAVNQLEDRRQPTTTLEGWRRFIEADPPEFELLDNAFWDALADRERTAYNEARVAHHSELVVVTTSSIEAITNQGRLLTLLNQREIGARRGLIISGAAATGKTTAIKQLGRFHELRTRARFPGDDSRIPVVYVTAPPKGSPRKLAMEFARFLGLPTINPRMNVTDISDAVCQVMIDARTDIVVVDEIHNLNLDTRAGEELSDHLKYFTEHLPATFVYAGIEVEKSGLFTGTRGRQLAGRCGVIHTNAFPDAKEWRQLVAAMEGTLRLHRHKPGTLVAEARYLHLRTRGMIGSLAHLIRAAAIQSMLDGTEKVTRELMDTVLIDYAAHTAAARTAC

SEQ ID NO: 5966 - protein, 344 aa, synthetic construct; identical to SEQ ID NO: 5965
  REGION 1..344: note = TnsF-Tn7 System Protein

SEQ ID NO: 5967 - protein, 367 aa, synthetic construct
  REGION 1..367: note = TnsF-Tn7 System Protein
MPVDKSGRVYVIGAVPLLHPEVQTVDDMLDGWRNQQLCRNLAHDTIDARIATVRRFIAHTNEFPWSWTPAIVEEFFGDLRSVKGRRQSTVRGYQNTLRLFCSYIADPDYGWDRVCEQRFGTHPAQVFFAWNTAAHVQDNEQDPKKRPFTKQELQDFFDHADDQVTLIANSKKKGWLPAYRDSVMFKVAYSFGLRFNELRHLQTIDFSRNAHACEFGRYGTVKVRYGKAKKGSPPKRRTVLTVFDWTPEVIDDWLTHGQPYMDDGIDLFPSEKGSLVAENTLLRRFRRYCNDLGLSDGLDLHSFRRSYITHLIEDGWDAKFVQDQAGHDYASTTSLYTGVSSDYRTRTLRRVLDRTIKDALSFGEESS

SEQ ID NO: 5968 - protein, 652 aa, synthetic construct
  REGION 1..652: note = TnsF-Tn7 System Protein
MPLPELLADPALELVSGSRPSLCSEEALAGLPETAVERARWWERHIVEILTGRPPGSAPGTRPRPEFDPTRQSLRQRELAKLAELQAAGHEVSRNALQRRRFAYERDGLLGVVDGRHNRRQPVFGRVDERVVAAVRDAIDGETDLSTGTVQRLQRKVAKALVAVYGRDDAPAMPSQPTFYRLVKRLAEGRHTFGSARTRRSLSKQPDGPFGAITVARPGEVVEIDSTPLDVRVVLDDGLVDRVELTAMVDNATRSIAAAVLRPTTKGVDASLLLARALTPEPMRPGWADALRMSRSVLPHRSLTSIDERLADAAARPVIAPETIVCDHGKAYLSQTFRQACCTLGISLQPAHPDTPTDKPKVERTLQSVGTLFAQHVAGYVGSSVERRGKHAEQGAVWPMVELQALLDEWIVAVWQNRPHEGLRDPVTPGKALTPNEKYAALVEVAGYVPVPLGADDYIELLPACWRTINQYGIRVNHRTYDAKALNPYRRQHSGVDDHGGQWEVHYDPYDVSRIWVRDHHNEEGWISATWTHLRTSPVPFGDALWRHAHAQVRENGAHKAREAEIAAIADDLMDRAAQGPVDRPKSERRLTGRTTAALQDRKWPRPAEPDTPEPEVWAEAAETDEDVDDDVADVIPLPVFDARKEAQSWRL

SEQ ID NO: 5969 - protein, 114 aa, synthetic construct
  REGION 1..114: note = TnsF-Tn7 System Protein
MNREVDYTWRLAELMAAHGMHNSTELIPRLAERGIQLSRPQVYRVVHQRPERVSLQVLAALCDIFGCGLEDLVTVTATDARKRRTATDAAPAANVVSLNKSVRPRRARVIADDH

SEQ ID NO: 5970 - protein, 690 aa, synthetic construct
  REGION 1..690: note = TnsF-Tn7 System Protein
MTGTRSPGEETAARRRLVVDAVAAADPSLPVDVVTGIVEAVNGAALRVLAAALAADPTALAVGAPTAVGRLVTALIAAGSTLPTPACALCGRVGAELIRDENGAGLCPRCRHRQLATACARCGIVKPVGGRDAHGQPVCARCSDRSQRRCGVCGALRRIGRRAHDGQPDVCVNCYRLPEAVCAVCGRRRPCAFADTDTPICKTCAPRRTAPCARCGQDRPPAARWPEGPVCDPCYTAALRHRGLCASCGTTRRLVHPPGPDATTCADCAGLPASHTCADCGIEDKLFTAGRCAPCALRHRSAALLAAGADQVPAALTGVHQAICAAANPYSALNWLRTGAAAGLLADLAAGRLATTHDALDAHPRRAAADYLRALLVAHQLLPARDDALARAEQRLTARLAAVDPPEHRRILTAYATWRVLRRLRRRAEHRRSPRTWTRYAETRVHVAIRFLGWLHDRGTALADLDQSTLDLWLTTTGPAAANIRDFLNWATDRDHTPALTVPTSRRRTGPATSENERIALLARLLHDDTLELTDRVAGALLLLYGQQLSRITALTTAQITQSGDTVHVQFGTDRVALPDPLDDHVLRLRAEGRPYTGLGAATTGWLFPGLLAGQPMTPSHLGARLRKLGVHATAGRRAALTHLASELPAAVLADLISLHPVTAARWTSDTGGTWNRYAAALVQDRNHQP

SEQ ID NO: 5971 - protein, 690 aa, synthetic construct; identical to SEQ ID NO: 5970
  REGION 1..690: note = TnsF-Tn7 System Protein

SEQ ID NO: 5972 - protein, 96 aa, synthetic construct
  REGION 1..96: note = TnsF-Tn7 System Protein
MTERGQRISARSVDDRFALHRAAAGLPAELSVHCLRHSYVSHLIEDGVDPLFVQQQVGHSWASTTATYTTIGTDAKNRMLTAALAVVLRAADEEER

SEQ ID NO: 5973 - protein, 248 aa, synthetic construct
  REGION 1..248: note = TnsF-Tn7 System Protein
MVRSVGSAALVLVDGATPPRAEPVLFDAMLEGWRRQQVSRRLGASIIDNRERVVRRFQAASGGWPWSWSPAQLETWIAAGGWAHSTVRSYQGAVALFLGYACDPRYGWVAECEQRVGDRPIQICHEDNTATHVADHEGRPDRRPLTRGELQAFFDAADDRVERLAAGRRKGWLTAFRDAALFKVIYGWGLRRSEAAKLEVADLAPNPAAPELGRLGVVHVRFGKAMRGSPPRRRAVATVMPWAADALD

SEQ ID NO: 5974 - protein, 126 aa, synthetic construct
  REGION 1..126: note = TnsF-Tn7 System Protein
MSVPVGYHWHLRRLMAERGLFATTELVPLLAQRGVRLSREQVYRLVTGIPERLSLATLAALCDILGATPGDLVEPYRKPSSARPASRLSARRAAGPVALAPDPAPPEVAAPAPLPRPRRARIAPRP

SEQ ID NO: 5975 - protein, 779 aa, synthetic construct
  REGION 1..779: note = TnsF-Tn7 System Protein
MTVQAPEVLADSIGVIVDAIVDAAPNLNRTVVEEAVTGVAGGRAKRRKVAQALLERPAVLTDGRSPAPRAIAELLIALRTAGATTISPPVCAECGKELRTFQRRDQDWYCAVCGPRREPCASCGQVRTIHCRDRQGRPRCVSCPPDDGGDPTDIVVEVVRSIDPNLPTAVIVPAVATVVPQPGQRYRLAWSLQDRPDLLTGAGAYAPVPAVLRLIDRLCDAGAQGIVRPPCPHCRRVIPLVKPRDGVRLCRNCVAKSRAEPCSRCGSVREAATRDADGEPLCAHCLSTDPSNQEVCIACDRRRPISVRTQEGPLCPSCRPYKSATCGICGRQGPCEISQATGQPWCTACQQRRARCSRCGQFGRVRGGSKTAPLCATCTRSDLDFWTSCPTCGETGRLHAGRCVRCSLDPRLHELLGDASGQIRPHLAALYQALAHAERPGTVTAWLDRSAAPAILRELHAEVEITHSTLDALSPGKPVEHLRSVLVAIGTLPHRDEQMARLERWITVTIAGPDQQHLLHRYAIWHLLRRLRRRTQGTETTHEQLATVRQHVKAAIGFLDWLTGRDLTLATCRQNRLHAWIGSNQATHRRETGHFIRWTKKHKLTSLDFPAIRWGGPSRVLDTEARWDQARRLLHDAQWPSTISRLTLDHVHADDEQVRLSLGREPVILPEPLDDLVRHLLARRRGHAAIGDHATSPWLFPGGQPGRPISSFRLAGRLRDLGIHSGQARSIALFHLATNLPAAVLGRMLGIHITVAVAWQRTSSGDWTTYAAEVSQRQR

SEQ ID NO: 5976 - protein, 779 aa, synthetic construct; identical to SEQ ID NO: 5975
  REGION 1..779: note = TnsF-Tn7 System Protein

SEQ ID NO: 5977 - protein, 114 aa, synthetic construct
  REGION 1..114: note = TnsF-Tn7 System Protein
MDNIRPRFGCADQPALWVTERGGRAKPAEINARFVAYRDVLGLPKELSAHSARHSYVTHLTEDGVDRRFIQEAVGHRCDTSTAIYTHVSGDFMNIALRKALAPALDTGRDGRAR

SEQ ID NO: 5978 - protein, 110 aa, synthetic construct
  REGION 1..110: note = TnsF-Tn7 System Protein
MTRKLDYRWNRRQVMAARGMFQTTDLARPLAQRGIQLSSSQLYRLVAERPERLSLKLLMALLDILGCSMEDLIEPIAATKPSRARKAASGEEAGVGDLRPKRARITGPGK

SEQ ID NO: 5979 - protein, 422 aa, synthetic construct
  REGION 1..422: note = TnsF-Tn7 System Protein
MVCAGCAGVASPFACTECGREDQPYGARRCARCILKERLTVLLTDPATGQVHARLRPVFAELVGSGRPQTGLWWLRKKPGTGPALLARMARGEIAIAHETFRALPQDRAHDWLRDLLAATGVLEPWEPRIERMTPWLNTVLAPLPDDQAEVVRRFAHWHVIRQMRHAAAQGRLTQCGANTARRRIREAIEFLDLLAHHGVSLEDATQDHLDRYLTAHPGRGGSIASFIAWLRSSRTNTALTVPWVNPGPPQVTVSDAARWAGVEHLLHDKDLRSYTRLGGLFTLLFAQPLSRIVAMRTDQVTTTPDGGVHVTFGAVPIQMPPILDDLIRDHLQLRGQSSYGRDAGWLFPGGIPGRPLTTENIRSQLVAIGIKPYQSRKAALFQLAAEIPAPVLAELLGTTNRSAAKWAHLAARDWQHYLALR

SEQ ID NO: 5980 - protein, 422 aa, synthetic construct; identical to SEQ ID NO: 5979
  REGION 1..422: note = TnsF-Tn7 System Protein

SEQ ID NO: 5981 - protein, 1172 aa, synthetic construct
  REGION 1..1172: note = TnsF-Tn7 System Protein
MSMCVRYAGDSYTYLLDSVTTDHGRPAVGASPMTRYYAAHGTPPGTWLGAGLTGLAAGEGLPTGSFVTPVQMERLFANGEDPATGTRLGQSPHVYTGPGDRRRPVAGFDCTFTAPKSVSVLWALADGPTREAIYDCHRQAITDVLTLIERDVARTRIGTNGTAQVDVAGVIAAAFDHWDSRENDPNLHTHVVIANRARGPDGRWRTLDSRALHRAVVAMSERYDTLLADHLTTRLGLTWEYRERGPRRNPAFELTTIPQQLLDLFSRRSAAIDVEVDRLIDKYQTNHGRRPEPTTIIRLRQQATLATREAKEVHSLQELTDEWRRRAATTLGTDSSDWVQRALTAQRDPLPTATPAPSQLVDDAATMVLAVLSRKRATWTAWNIDAEASRALKAHRFPTPAARDQAVAAVVAAVQARSVLLTPPEAASTPTALRRTDGMSAFRPHRGELYTAQATLDAENSLLTTARDTTGPTAEPEHLTYTGLFDDQAAAVRKIARSGRVLDILVGPAGAGKTHTLAALRATWEAAHGSGSVVGLAPSAAAAEVLGNSLGVPAENTTKWIVEHDQQPDRHQRLTRAKAALPRVTSREAAREIAAHVHRLTQDLDRWRFHPGQLVIIDEASLAGTADLDRITACAAEAGAKILLVGDWAQLSAIDAGGAFGLVVRDRGAGVPELGAARRFQYAWERHAAGLLRVGDPEALRYYDHHQRIADGDHDTTVEKAYSAWATDEAAGKTSLLLAGDTDTVRALNHRAHSDLVTSGRVTPTGTRLHDGLEAGGGDRVVTRRNDRHLLVGPRWVKNGDTFTVTHRHDDGALTVQRLGGGPTVTLPAPYVREHVELGYATTAFRAQGATVDTAHAIVTGPGMTREVLYVMLTRARETNTAYVCTDRPVEPLPGFDDQATTVRSVLTAVMGNVGAAVSAHESADLEREQAVSIRTLAAEYETIAHHAQTPRWTGMLARAGLTLTQLDQVTASPAFGALSTALRRAEAHGMNIEAALPCLLERADAGTVDLASVVNQRVERWTDSAPTATALTGARFVLGLLPAATAADPEMQVALQDRVRLMDQRANELIDRARTANAPWLAQLGAEPTDPQAALAWRTRARTVAAYRERHQITDVWGPLGTVDERNAQQRRESAIAARAIAELRPQTPSLAPRPAAANSAPTRYSDVVGR

SEQ ID NO: 5982 - protein, 1172 aa, synthetic construct; identical to SEQ ID NO: 5981
  REGION 1..1172: note = TnsF-Tn7 System Protein

SEQ ID NO: 5983 - protein, 499 aa, synthetic construct
  REGION 1..499: note = TnsF-Tn7 System Protein
MTAPAEAWPAPPVASMAGRVWVPWAITDHRVPSAAGMPETDLGLAERFVLWCGDHWRFRPGIGWMRYDGVRWVWDEHGHHARTEVQQVVRAVSELEAETLPALTGDDRRGSARERRRRWARTCETPRRVLFALECAETLPGMCVGEDAWDPDPLAINTLSGYLDLRTGHLHPHRPRHLCTAVVNAPYDPDATSDALERVLDHLSGGDDSVRDFLGRWLGYCLTGSMAAEVFLFLSGAAESGKSTLFSAFTRMLGTYAETSSPESFASRASAGGATPEMARLAGKRFVYVPEAGGLRLDASRVKAIVGGDPIVARLLHRNPVTFQPRFKLAFTANELAVVPDDDAGLRRRLLPLRVEATVTRRDTSLKATLEDTEEGRAALLAFAVRGARQWLADGGDLAALRPPPQVREALTAFFAEMDPLAEWWEERVAVMEEGGTTTSRLHADYAEWCRDHGVRQVLGIKGFAQRLTVRGFPVARDRTTGSLRLGLALRALRSPCSS

SEQ ID NO: 5984 - protein, 361 aa, synthetic construct
  REGION 1..361: note = TnsF-Tn7 System Protein
MLEGWQRQQQSRLLVEGTITSRLLLLRRFADFAEGFPWQWTAGDVEDFTVSLVSGSNRLASSTIRGYHLTLRLFCDYLLDGRYGWVAACEERFGAIPSQVCHDYNTVAHLSEYEGRPGRRPFTYEELQHLFDFLDARVETVCRSGRKGALAALRDAQMVKTCYAFGLRRRELCQLDVADLRPNAQMPQWGTFGAVHVRYGKSLRGGTPRRRTVLTVPEFDWVVGGLRQWVEQARPLLNPGQRPELWLTERRQRIATNTVDRRFAWLRRQAGLDEALSLHCLRHSYVTHLIEFGYPERFVTEQVGHSYASTTAIYTSVSNDFKTKTLKAGPGEGLPIPGAAVTTRKVFGWLNGLRCGGTCAR

SEQ ID NO: 5985 - protein, 108 aa, synthetic construct
  REGION 1..108: note = TnsF-Tn7 System Protein
MAERLAMRWNLRQVMASRGMFQTTDLIEPLRERGIELSRQMIHRVVTKTPQRINTDLLAALCDILECTPNDLLELQVEQVRPAMAVNDHGSGIGELRPIHTTVRRPQQ

SEQ ID NO: 5986 - protein, 469 aa, synthetic construct
  REGION 1..469: note = TnsF-Tn7 System Protein
MAAKIRVKWPDGPICGICFTTALRTRGVCPGCAEDRLLPGKAEGESICRDCAGISTNMTCDSCGAEAERFRAGHCIRCVLRTDLEMLLKPHSPPDLRLKALINVLAEVERPESIYTWMRGENPQELLARLGTRNLALTHESFDALPGNRSVEHLRELLILHGMLPERDRQLATFERWLATRIGDLANTPTIQSPIERFATWHHLKRFRSLTSQGRDLSAAVRSAKQEITESGKFLAWLGVEYGLTIADLRQGHLDEYLSEGPSTRHSIGTFIVWLVKNHETATLEVPHRYPATRPLITQQQRIDLIRHCLESGHLPLAPRVAALILLLYGQPIGKIAALRCSDLQTQPDGLHLNLGNIPVLVPAQVAPMFWGYLAHRPNQQTGNGASPWLFPGTMPGQHIHADSMLVQLRTLGIDPGGARNSTLRSLVQELQPTLVANALGYSYQVIHKHAADAAVPLAGYARKVPKTH

SEQ ID NO: 5987 - protein, 469 aa, synthetic construct; identical to SEQ ID NO: 5986
  REGION 1..469: note = TnsF-Tn7 System Protein

SEQ ID NO: 5988 - protein, 368 aa, synthetic construct
  REGION 1..368: note = TnsF-Tn7 System Protein
MDPEQGRLIRLPLRQGATSADAVFEDMLTGWEHQQLARNFTAATIRGRERLVRRFVDHTGHFPWEWTLGDADEFFAHERSILNLAYATIRAYQTHVKVFCDFLTDPAYEWDRLCIQGFGSSPSQIITEFNRARHAQSNEQAPTKRPFTRAELQGFFDLADLEVDRVLSSGRKGAVAAYRDATVFKTAYAWGLRANEVTHLQTVDFPRNRRAPQFGDFGVLQVRYGKAQRGSPPKRRSVLTVFDWSPGVLDAWIRTGLPWLAPMVSEIFPTATGLPVPKSNLHRRFRDYIEELGYPPGLDIHSLRRSYVTHLFEHFGFDHTFVQRQVGHEHASTTSLYTSVSSDYQTSELNRVLEDMIEKAVKPKEKRE

SEQ ID NO: 5989 - protein, 113 aa, synthetic construct
  REGION 1..113: note = TnsF-Tn7 System Protein
MKRDIEYRWRARELMARHGMRNTRELVGPLRERGITLSESQIYRMVGQEPERISFQLLAALCDIFGVEANELFTFTATNSRNERRQQAAASGANVVRFADAYKPVRARILDED

SEQ ID NO: 5990 - protein, 308 aa, synthetic construct
  REGION 1..308: note = TnsF-Tn7 System Protein
MLDGLPSRQQHVQYLRTVLVAAGVLPVRDEQIDGIPPWLDALLAAQPPHITRLIRPYASWSVLRRARGHSMGRASTPSVRKYARSRILIAVRFLRRLDEQQLSLGAITQRRVDAWLDAGTTTHLRLRDFLLWAHGRQLAPELHVPWLGSQEDPDDFPDDHERWRLLRECFTEEDIPLHRRVAGSLVLLYGQRPQHIVTLTRSHVTTRGRDTYLSFERHPVLLPPPLAEIVQRLAEAEPFGRRPIIREHSSGSKLLFPGFRPGASMDHGRLTKQLNALGIRVRPARNSALCSLAGDLPAPVVGELLEST

SEQ ID NO: 5991 - protein, 308 aa, synthetic construct; identical to SEQ ID NO: 5990
  REGION 1..308: note = TnsF-Tn7 System Protein

SEQ ID NO: 5992 - protein, 479 aa, synthetic construct
  REGION 1..479: note = TnsF-Tn7 System Protein
MNNYPCQDCGCLEAAGRKWPRLCWKCRQRRHYHPAECPSCRVVRPLAWPGPDPHQMICAGCAEAPSIFACKQCGREDHPYSFSQCARCWLTERLDGILTDPSTGTINTELLPLYDTLRAGRQPRTTIRWLIKPGSVAADVLHQFATGELALHHDTFRHQLPQGRRYDYLRTLLTSTGILPPAPIGIERLLPWLAELLAQQPSHHAEIINRYAHSHLLRRLRLHAEAGTMTASMTNHARASILLATRLADWSTRQGTTLTDLTQAELEQYLHEQPGAHHTASGFITWLDNSGTTTGLLLRKPAKTEPAVTMSDDHRWDSVDRLLHDHAINHYSRVAGLLMLLFSWPLNEILRMTHDHIAEQPDGRVLVTFDSIPIEMPPGLSRLILDQKASHGLTPYTAGDTNWLFPGRNPGTHMVTERIRNELVSHGIHPRQSRSAALFALASQIPAPVLAEIAGITPAAAIRWAALAARDWSRYIADR

SEQ ID NO: 5993 - protein, 479 aa, synthetic construct; identical to SEQ ID NO: 5992
  REGION 1..479: note = TnsF-Tn7 System Protein

SEQ ID NO: 5994 - protein, 344 aa, synthetic construct
  REGION 1..344: note = TnsF-Tn7 System Protein
MLKGWERQQRSRLLGEATIAQRERLVRRFAEFAEAFPWGWSASDVEDFTVSLTSGEGRLAYSTIRGYHLSLRMFCDYLTDSRYEWVRQCRDRFGQVPTQVCHEWNTVAHLNEYEGRPQRRPFTVDELQALFDHLDDRVGRISAAGRKGSLNALRDAVMIKTAYAYGLRRNELARLDVADLRPNPHMPQWGGYGSIHVRFGKASKGSLPRRRTVLTVPEFDWAVEGMRQWVEEVRPLFRAADHPTLWPTERLTRVSTRHIDERFAAARDALGLEPSLTLHCLRHSYVTHLIEFGYPERFVTEQVGHAWASTTAIYTSVSNDFKNRALKKALGRVYHPNEPQGDQQ

SEQ ID NO: 5995 - protein, 116 aa, synthetic construct
  REGION 1..116: note = TnsF-Tn7 System Protein
MSRTVTMQWNLRQVMADRGLFQTSELLPLLAERGIHVSREHVYRLVTRTPQRINIDILAALCDALGCDPGDLLTPIAETTTTARTGTDNNPGLADRGPRLGGIQPVRTTLRRPNDA

SEQ ID NO: 5996 - protein, 371 aa, synthetic construct
  REGION 1..371: note = TnsF-Tn7 System Protein
MPLRAALVAAEHPRTVLAWLRNSASARILSETVASGRLPSHADLDTIAASGRGAAQCADYLRAVLVSFGTLPVRDEYLAAIERHLTRTLVRHPEYTELLKPYVRWSVLPRARRRAARAASTSGRARWAYTRVNCAVAFLTHLAGLGLSLPEATQQHVDQWLAEGPGTRYELRDFLVWTARHGHGRGLLVPHRGKAEPEGLDEDVHWDLLQRCLHDDMLPLDVRAAGALLLLFGQHLTRIVTLTTGHLGTHDGHPTLRLDDTPMRLPHPLATVLTRLAAEPKQGWKGNTRGTWLFPGVRPGTHQSTGPLARALAEHGIPVRPARATALIQLAQDMPPAVLAPLLGLHVITALQWRRRAGTDWTAYLAARIKR

SEQ ID NO: 5997 - protein, 189 aa, synthetic construct; identical to SEQ ID NO: 2787
  REGION 1..189: note = TnsF-Tn7 System Protein

SEQ ID NO: 5998 - protein, 424 aa, synthetic construct
  REGION 1..424: note = TnsF-Tn7 System Protein
MVCASCAGVESIFACRECGREDHPYGHTRCARCFLRERLADLLTDPTTGQIHRQLEPVFDELVNSERPQTGLWWLRKKPGIGPQLLGQMACGAVDISHETFRTLPSDRAHDYLRSLLIAVGVLEPFDIRIERMLPWIEDIVAELPAEDAALIRRFAHWYVLRGMRKAAREGRLTKSMADACRRRIRVAIEFVGFLARHDASAATATQDLLERYQEHVGRMLNNEYAFIVWLRQSRTNTKLRILDVPQSPPPVTVSDTQRWAAVERLLHDATLRRYTRIAGLLTLLFAQPLSRIVAMRTSQVTVTARVVQITFSAIPVQMPPILDDLIREHLNHRGKSLYASRETGWLFPGGNPGRHLATENIRCQLVAIGVKPYENRKATLFQLASDMPAPVLAELLTITNKNAAAWAKLAARDWTDYIAERSR

SEQ ID NO: 5999 - protein, 424 aa, synthetic construct; identical to SEQ ID NO: 5998
  REGION 1..424: note = TnsF-Tn7 System Protein

SEQ ID NO: 6000 - protein, 1950 aa, synthetic construct
  REGION 1..1950: note = TnsF-Tn7 System Protein
MRVMVMTLHKLTAGDGYLYLVRQVAAADSTERGRSTLADYYSAKGESPGRWMGRGLAALSDAGRCEASPQAREAIWTVDEGSGVSEAQMRALYGLGLHPNAERIETYVIGRSMGSGRAASRLGREFLVRDGEPEYARRLAVAFRDHNAENGAHWNATIAPEIRAQIRTRVAVKLFAEEYGRPPADDRELSGFIARNTRARTTAVAGYDLTFSPVKSVSALWAIAPLSVAEQIEAAHDAAVADVLEWLQDQATFTRTGAGGVAQVDAEGLIAAAFTHRDSRAGDPDLHTHVAISNKVSHVDTGGVRRWLALDGQPLHRVTVAASELYNTRLEAHMIDRLAVSFVEQSRGLGKRPVREIDGMSPELMTRWSSRRAAIKARIAELAKQFQADHGREPTNTEIIALAQQATLESREAKHEPRSLAEQRHVWRTQAVEVLGRDGLHRMLAGVLAGRNRTRTTPVVDHEWVASRAGELIATVSESRATWQRHHVRAEALRIVRTHGVAHDVALVERLTDTALSDAFSVPHARIADTELGEPVALRRRDGASVYSRHGVALYTSRDTLAAERRILAAVHRCDGRAATAADVELALANSAARGRILNPGQAALVSEMASTGRRVALALAPAGTGKTTAMAALAHAWRSSGGHVIGLAPTADAAIVLGADLGATTDTLDKYVWLADPDKAAISGVPDWFKRVGPDTLIIVDEAGKAATAGLDAMITDALRRGASVRLVGDDGQLSSISAGGVLRDIAEATDALTLSEVVRFKSPAEAAAGLALHDADPAGIGFYIDHHRIHVGTEETAADMAYQAWRADLAAGADSILLAPTNDVINELNARARSDRLAADPDAASAATVVLADQLHASVGDTIRTRKNNRRITIGRSDFVRNGYRYTITEVLTDGSVKARHLRSGRIVTLPADYIAEHVTLGYAATIDSAQGLTAGRRDTKGTCHIVGSDMLTRQHLYVAMTRATDENHLYLSTAEGDPHRLLSPKATHPDTAVDVLTRTLARDGAQVSATTEARRAEDPATRLQAAADMFYDALGVAAENQLGAGARDRLDAIADDVIPRLSQREAWPVLRRNLSVLTLGGADPRELLTDALAKGSVDDATEPAAVLDHRIDPAGTHSAGIGVLRWLPAIPPALADDPHWGAYLARREQLVQGLADQIRERARAWTNATAPAWARPLITVNPALTAEIAVFRSATGVEDADTRLTGARQYPVRTRAVQASLQRYAAADIGRRSADTTRWNDLIDAIDPRLRADAYWPQLAAQLAQATRTTADLRQIITTAARQGPLPEELPAAALWWRIAGALSPTATLATTHSRLRPAWITDVEAAFGAALTETITSDPAWPGLVAAISAADPATWTPRDLLHVAAEHLADAADADHPIPPGDYARLITYTVDAFTHRLQARLGIDVEDLPTPEDAPPHPDEEALFPPDPDSPFADIDQAPPFDDHFDAAPPDGSCEYTSQEFGDLQFEDLSANRPVPELGITMNLVTTLQQEYRDVCESIKTLDAEIRAGNGPAMRAAADELLRMRRQVDADRPYGHAVATVMEQWADADAAYNDTLRLIEHARTQLDLLRTNPDADELDIASAQADLAFHTRRLPQPPSHQFHQAFAEAQAARTAAAGGHKIVTEHDIAAARGDAERADLAARALLRDRRQALRRELDRAERDVAGAFAAAQTATSDTLEQLLKTAHSEVALLQVAGDADLTRTPLLIPAAALAAHEPHTADRLKSLAAQPYRLSVVRADATDRETVAALYTLRSTANANDRKVLWLSTTDASAAPAREAELADTITTASRAERQISDHQWALPPGAIVIIDDPAAAELDQLATIARHADAADARVILLDPSNSRGPSSSALRLLTNSLPWNTTLGATPSGSIDPLLDATPAVTLADRLGRTHLSECWRHVLSQYDNAARGVRAAQRRHLAVGWRTPEAALEAPEHTLGAGIDD

SEQ ID NO: 6001 - protein, 1950 aa, synthetic construct; identical to SEQ ID NO: 6000
  REGION 1..1950: note = TnsF-Tn7 System Protein

SEQ ID NO: 6002 - protein, 373 aa, synthetic construct
  REGION 1..373: note = TnsF-Tn7 System Protein
MSVPGSAHLVLAAGVVHLDEASAVFEAMLSGWGRQQKSRLLAEATIESRLAFVRRFAAFAETHPWDWTAGDVEDFTAALMSGNNRRAPSTIRGYHMTLRLFCDYLLDGRYGWISQCEERFGRIPSQVCHDFNTAAHLVEYEGKPARRPFTYDEVETLFAFLADRVDIIARSGRKGALAALRDAQMIKTAYAFGLRRRELCYLDVADLRPNPRMPAWGTFGAVHVRYAKSSRGSAPRRRTVLAVPEFDWVIDGLRQWVDQARPLLSPGSRQELWLTERRQRVATKQMDKRFAYLRAEAGLPQELTLHCLRHSYVTHLIEFGYPERFVTEQVGHSYASTTAIYTSVSNDFKTKTLQAALRRVYGNTTTSEGRDDD

SEQ ID NO: 6003 - protein, 110 aa, synthetic construct
  REGION 1..110: note = TnsF-Tn7 System Protein
MTTRTVLRWNLRQLMAQNGMFATTDLVAPLHERGVEISRQMVHRIATKPPQRINLDLLAALCDILACTPNDLLELVAEQVREAPAVNDSGPGIGDLRPIRARIRRPGDNK

SEQ ID NO: 6004 - protein, 436 aa, synthetic construct
  REGION 1..436: note = TnsF-Tn7 System Protein
MTPGRSATGQPICRDCAGIRTNLTCNRCAQEAERHRGGLCARCALNDDLNALLKPGNDRQILQLVDALAAADRPESIISYLRGARAHELLTRIGTRELPLTHEALDSLHRSAAAEHIRALLTHHGALPRRGSEPVARFRLWLTARLAQLPDDGTRSNIEQFATWRHLRRIREKEKHADAVNLDTVTHAAKQEITEASKFLVWLRTAHNVGPAGIQQAHVDEYLSEGATTRTHIRNYMHWLQRGKSRRQRTMDAPHRVAKSLPMVTQEQRLEMVRNCIELGQVVASTRIAGLIFLLWAQPLNRIVMLRQRDALRRVDGLYLQLGSTPTVVPSELAETFVTYFAAPDNQRTGNTGTDWLFPGRRAGGHLHERTLSQQLKVLGIDPQRARNATLQDLTRQVDARSLIDLLGYSGHTITLHAARAAAPKADYITLRRERD

SEQ ID NO: 6005 - protein, 369 aa, synthetic construct
  REGION 1..369: note = TnsF-Tn7 System Protein
MDEDSNVVLFAPFGGSVPDPDFFLESVLDGWERQQRGKDFASGTIGSRRSLVVQLVDFSGHYPWQWTLADADDFFSHARGIRNLAHATVRSYQTAIKLFCDFACDPRYDWNEQCARLFGAGFAQVITELNRISHAQPTDARPAKRPFTQRELQQLFDLADLEVQRVINSGRRAPIAAWRDAVALKAAYSWGLRSNELRHLQLVDLSRNHRAPYFGDYGVVRVRWGKPHRGSAKKVRSVLTVWEWSVDVVRDWVTNGLPHYGEPLTDLFPTSKGNVVGESHLLGRLRAFIDELGFPPGLDIHSFRRSYATHLIIGEGFDVAFVQMQLGHEHASTTSIYALPSPDYQTRALQQIHERTLAAAKQLPRRREP

SEQ ID NO: 6006 - protein, 114 aa, synthetic construct
  REGION 1..114: note = TnsF-Tn7 System Protein
MTRREIHYTWRVREIMARRNIYLAKDLAPLLHERGITLTANAIWRIVKDEPERISIQMLVALADALDVSLDELITYTARDARTIRAKRAAGDRLPDIRDYRPTRARILDDDDDE

SEQ ID NO: 6007 - protein, 276 aa, synthetic construct
  REGION 1..276: note = TnsF-Tn7 System Protein
MTRAHAGQSVAFLLSLLIRSGVLPDFDIQAARFEHWFQRWLPTVPHPEDRLLLRRYCTWELLPSGRSLRGRPATAVRSGSTYQKVRAALKRCAALLQQIRASGETLTTYPQRSLDGFLTGSPSQRDALAPFTRWLRRHRLSRLRVEFRSHRLEGRDYAADHRWTMARAFITRDDMDPVTRVSGLLVLFYGLHLTRIAAITRAQVDTTARPMTLTVGTEPIELPKSSPKQWSSCSTATAPTLGSSRAGTRADRSPPGRSAVDSVKKDSSPAALVSPR

SEQ ID NO: 6008 - protein, 195 aa, synthetic construct
  REGION 1..195: note = TnsF-Tn7 System Protein
MTGIQEPRPAQTTRWHVVTGGPSSGKTTTVNLLRGRGYTTTIEHARHYIDLQRITGRSTAEVRARQSEFQRAVVDMQIEQERSLDPQQTVFLDRALPDSLAYYRFLGLAPGTALLGALAGARYATVFLLDLLPLAPDYARTEDPAAQRRIHDLLGLVYQELGFPVVTVPALAPDARVDFILERASVGTPAERGVS

SEQ ID NO: 6009 - protein, 195 aa, synthetic construct; identical to SEQ ID NO: 6008
  REGION 1..195: note = TnsF-Tn7 System Protein

SEQ ID NO: 6010 - protein, 385 aa, synthetic construct
  REGION 1..385: note = TnsF-Tn7 System Protein
MQGKHGHLSREQKQLALRLHSKGWRLIDIAREIGCTAPMVGRMAREGRHLDGKPFGWEPREGHLTVFDREEILVGLARGDTLTAIALALGRAVSTVSREVKRGGGREGYSAWRAHEDAREQARRPKPFKLDGGRLLEVVATQLEQLWSPQEIAARLRLEHPDDPEMHVSHETIYQSLFVQGRGQLRRELARCLRSGRAARKSRTATDRRGRLPGMVMISERPAEVEDRAVPGHWEGDLILGENSRSAVGTLVERSTRLTLLLHLPDGKSADKVEAAMREAITALPASLARTITWDQGAEMAKHSEFTTATGIPIYFCDPRSPWQRGSNENTNGLLRQYLPKSTDLSIVTRAELTAIQDSLNGRPRKTLGYLTPSEKFTELVATTG

SEQ ID NO: 6011 - protein, 415 aa, synthetic construct
  REGION 1..415: note = TnsF-Tn7 System Protein
MARKNYTDEFRQRAVDLYESTPGATLKAIAADLGISRGALKEWVDKLGSGTAAAGSVSPPVSVRSESQAARIIRLEAELAVSRAEQVKLETERDILRQAAKYFAGGDELVNRFQFVEDHKDAYGVKRLCEVIEIARSSFYAWLAAAPGRAARAADDARLAARIRVLQDPAQGGDRAYGAPRITADLNDGVPAAGRVNHKRVARVMREHALAGIRLRRRVKTTIPDQSGRKFPDLVGRDFSTGEPNRRYVGDITYLPIADGSNLYLATCIDLGSRKLAGWQVADHMRTELVEGALRGAHRDRGSLAGAVFHSDHGSVYASKAYAALCEQLKVTQSMGAVGTSADNSLAESFNAALKRELLQGASAFPDQATAYRAVFRWTNRYNTRRRHSAIGQITPNSYENTYAAARSATLTEAA

SEQ ID NO: 6012 - protein, 818 aa, synthetic construct
  REGION 1..818: note = TnsF-Tn7 System Protein
MTTIPRAETDPNAVIVDLVAAVEPHLPPQTVQHAISQAVHAKPRAVLLARTLERDPGLLTSGRAEGPASVERLIRLLVQAGAVNVVRPPCSRCGRLGPLTNTNGSGLRTCASCGGRRADTRWACGGCGNSKTPRYGLDRSGREVCRSCYQAECTEDPAADLLNHLNGLALGLGESVLQEVIAEVTKGSTSSTRRLLWDVQDQPGLLAGQAHHYGPRTLLLAERLHQAGADGVPVPRCPHCDRTVRLSHSIERLRVCGTCYNRSTAQSCTHCGRSRPVAGRTPDGSPICSDCRDKDATCQEECVGCGRHRAVSARTENGPLCKTCRKPPTMQCGSCGKVRPCFHAAAGTPRCRACLITLEPCTGCGRTLRVVARTPRGPFCENCWEVAPEARKPCQQCGTVEKLFHHGLCRRCAGERHLRNLLTSPDGTTRPELDKIVDALLNFNSRRTLLYLRESTTATRLVTDLASGTCELTHEAFDARRTGQRDMALDYFRAVLVSAGILPVRDEYMARLEQWIDRKLDTIDDTENRRLITAFARWDRIARLRRRSRGKPISAQAADIIQTQIVKAIALLDWIKDQGETLATCRQAHIDLWLTSEDHQGPYTAAPFVTWAVRSKFASNINIPSRPRRVSHLPLDADTRWSIARRLLNDDSIETKDRVAGLMVLLYGQTPARTCRLTTAHVIQDDKGVALQLHEIPLRLPPPLDTLVLRLVGIAEDHQHTVTANESNTPWLFPTQQPGKHLTSGQLLARLRKIGLPSESGRCAALLDICTTMPAGVLERLLGISPAAADRWAAGAVRAAYAAEVARRSDTGETLDHL

SEQ ID NO: 6013 - protein, 818 aa, synthetic construct; identical to SEQ ID NO: 6012
  REGION 1..818: note = TnsF-Tn7 System Protein

SEQ ID NO: 6014 - protein, 375 aa, synthetic construct
  REGION 1..375: note = TnsF-Tn7 System Protein
MDPAAVAVESGLADVVTLQRRRQARVSAHDEESFFLDTLSEYQWARDAAGLAPATLDGLVKPVIEVCNYYGTVPWQLSPREVDRYFAGPGKRASSTLRAKINKIDAYFAFLEQRYAGEIMRRFGAAVESPIDLFNRPRHRGDFGLRIPPSQTAMRDFFSRWREDLPNARKYFVACRDYVMTKVAYLSGVRAAELCGVCMGDIHWEHGQWGRFVVQGKGARASGPRPREAYMFQEGRALLWWYIEEIRGEFGDDAEHPRAPLWPSERKPTAVAALNLPIAPAIVPSTFRRSLHAAATNYLTGPVADLFPHLLRHACATHNYERGMTLWEVQKVLGHDWATTTLRYMATAHADPEVANLAASSQAAQRLVMDRGNLR

SEQ ID NO: 6015 - protein, 733 aa, synthetic construct
  REGION 1..733: note = TnsF-Tn7 System Protein
MSEITVTRRPHAADQVPALVSVIAPPLLGALTPLLEPGLAALTAAATVAGSAAFSTHYVGKVPDRILNATGLRDVLHAQRSTLLGSSLLTSMAAVPGAFLGPAYTDALMAGVLDPASVSGLVSAAWWSAWATLTYKLRPALAARKVKIPAPAPGEPAGPGPGGLYRVWADHISSEGGAHPGQHLVGVRDSDGIWEGIIEAPQGKSVNVSAESVGSAYRVPAACVSFTPGHHPGEQYVTVLRTPPAELDPNTMEGRWARLVRPRVMPGTHLKDAQTDPATGGWVAWVVADDDVPAVPVPDRKQLVGALHSAMTLVDYQPHASNPRRGKIRIMEKNPLEDGVPFPGPQVLEPSTGGYVAIGRGVSGRVARLQLFDPVLGAQHVFIAGVTGSGKGGVVQIVALAAHLAGMAIINGDPKGSSNPDVEAMAAYSATGDDTIKSLRVAYALLQHRVADSGRLGRKNFKATPDCPWVMVVVDETHMVTDQSTEHFKEAVFILDKIAALGRSMGMTLLIVNQAVNADKLGGSTAMRMNVIQGGALVMLRTDSAQSNLVTVDGFEGIDPGAIPAAWSAEDEHLVWSDDIPINDPKRTYGLGYVGSPGEPVQMMRSWILESAAPHIRHDRIIWPQDWPGWDDRHDIAEIPVNGDDDTMSVTSSGGSSGQYAPPLAPVFKAPAEPTADAAVLAVLDDAVGLEVPKDDIRALTGLNEKTLSNTLTALVKTGTIDRVKPGVYRKNQ

SEQ ID NO: 6016 - protein, 115 aa, synthetic construct
  REGION 1..115: note = TnsF-Tn7 System Protein
MKWNLRMVAAQRDLWRPTEVLAAFQQVGFNPSLSKVAALWGGAPVTVRLDDLDKICTALNCTVADLLQAEPLADTQAAPESGQQAVGAESQLPAGPLRPVPRTRRGSGPRSLPPS

SEQ ID NO: 6017 - protein, 326 aa, synthetic construct
  REGION 1..326: note = TnsF-Tn7 System Protein
MKLFRLENALPLDTTIPEPSLVCLIGAAGSGKSTWASTWPATQVLELDTFRALVSDDEGCQESTGDAVFALQVVLEARLARRKTTILDATNTGKSVRADLIATARRHGVPTVALVVPTPVSVCVERQESRPANRRVPEPVVRAQHAAMVAALPGLPAEGFDHVVVAENLYRLQELLQPLSDARRADLGWDDSEGLGDLLLVRRTFGPEILPMWRWRDGSQLAGGDRVAEIRLGADRIVLAQRNDIDGEGDIGFDVLVGCPADDECQGPAWAPAYNVTDLLRALTGELMNDPDVRCTVHHPEDDRDLEDDPEGRADLEAQAMEAIYG

SEQ ID NO: 6018 - protein, 326 aa, synthetic construct; identical to SEQ ID NO: 6017
  REGION 1..326: note = TnsF-Tn7 System Protein

SEQ ID NO: 6019 - protein, 377 aa, synthetic construct
  REGION 1..377: note = TnsF-Tn7 System Protein
MSEGTREVAGSARLELVSGVHLLHPEDAVLEAMLTGWARQQIGGRGLVKKTVHDRRKIVEQFRDFTNEYPWKWTAADIDEWMADLVMRHDRAKTTLRTYQGAVGVFMDYLLNPVYGWVEVCLERFGTHPTPILHDGNRREHLVDYEGDEDRRPMTREECQLFFDHIDERVEKAIKRGRKGALTAYRDSTLFKTIYGWGLRASEASGLDVVDLYRNAKAPQFGRYGMVHVRKAKGTKGSGPRRRNVASIKPWAVEALEDYVVNLRPRYGFPSHPALWLTERGGRLRVREIEDRFALYRDELELPKELVPHCLRHSYVTHNIEDGVDPRFIQEQVGHLYASTTALYTAVSDDFANTMMLKAIDLAFGNDSDLTGRERNG

SEQ ID NO: 6020 - protein, 109 aa, synthetic construct
  REGION 1..109: note = TnsF-Tn7 System Protein
MTVKLDYKWHLREVMATRGMFSTTDLRPLLAERGIDLSASQVYRLVVETPERLNLKVLMALLDILGCSMDDLIEPVAAGRPRANKAADGTETTGVGAFRPKRARIVGPS

SEQ ID NO: 6021 - protein, 876 aa, synthetic construct
  REGION 1..876: note = TnsF-Tn7 System Protein
MIKKMGYRWRLRDLMADQQMFKTTDLIPHLVERGITLSREQVFRLVTQPPQRLSMDTLVALCDILGCTPNDLIVLEVVNKPVRKTAGAGGGGEWCAGGHAQKNSRTTAWQVMTRPHSTAPIAHVRESLVSSVISAVGSGMTRQRAQQLLVEAKGWSTANARHLHEYLGENPGAFTAPTHECPAAFPRLLTLLAAAGHADAVSLLGCAKCGRTDLALRRNSPEGRCCPWCVIRTELRPCARCGEDGYIIARRADGPVCRRCYNKDPQFLQVCAGCGRKRPPNARRDDGTVLCQRCSLPPTQSCCRCGNVRRVHAQTADGPICRTCYRSPARKCGVCGEIAQIQARATDTHPDTCVRCYRNIGECVVCGRTRAGGKYRGGSLHCVTCWPHHPRHCDSCEKPGIACATWPLGTVCRDCYHRRRLHPQPCANCHRTAVMVGRNPDGQDICAPCCGVDLDFSCRTCGIEGLNYADGKCTCCVMTDRVNVLLSLDDGTVVPQLQPLADALSAANPESVQTWLQASSSARLLAQLVAERRAISHELLDELDQDNATRYIRQLLVTTGILTSRQEEFAQLQIWASRKIQHLPPHQSRVVRPFAEWRVIRDARKRAARRRYTIGSAANDRQKISTTIAFLTWLDDQEIPLDSVTQLHLDRWLDAHPTKHKYLAAFIGWLEKQRLTQAELVVPQRRSQLPSRLLSDDELEQQLKRCLTDDTLPLDVRVVGALIRLYAPPLVRIAELTTDRYHTDDDGSYLTIGRHPVLLPPTLARLIEQLIARGPVNTLLRNGSADNPAYLLAGRPPSRPVNPRSLQQRLTKHGLPVIHARNTAMITNAATLPPPVVAELFGIHPTTAYQWAQYAQSSWAAYLQACQSTAQPGLRC

SEQ ID NO: 6022 - protein, 503 aa, synthetic construct
  REGION 1..503: note = TnsF-Tn7 System Protein
MALGRAFSVAVRGVDGQIVEIEADITSGLPGVHLVGLPDAALQESRDRVRAAVSNCTNNWPQARLTLALSPATLPKMGSVYDIALASAVLSAQRKNPWHRLDKTVLLGELSLDGRVRPVRGVLPAVLAAKRDGWPAVVVPADNLAEASLVDGIDVWGVRTLGQLQDWLSGTGALDGRIEPDTTVPEPTADLVDVVGQTQARFAVELAAAGAHHLMLTGPPGVGKTMLAQRLPGLLPPLTESESLEVTAIHSVAGLLSGDTPLITRPPFVAPHHSSSVAALVGGGSGMARPGAVSRAHRGVLFLDECAEIRLSALEALRTPLEDGEIRLARRDGVACYPARFQLVLAANLCPCAPADPQDCVCAAVAKRRYLGKLSGPLLDRVDLRVQMHPMRAGAFGGGDGESTAQVRRRVAQARQAAAQRWLPYGFRTNAEVSGPLLRRKFRLGSAAMDPLQKALDRGLLSIRGLDRTLRVAWSVADLAGRTSPGPEEVATALSFRQAGAQR

SEQ ID NO: 6023 - protein, 503 aa, synthetic construct; identical to SEQ ID NO: 6022
  REGION 1..503: note = TnsF-Tn7 System Protein

SEQ ID NO: 6024 - protein, 343 aa, synthetic construct
  REGION 1..343: note = TnsF-Tn7 System Protein
MLEGWRRQQSARFLRAGTIGARLRLIRRLEAFSGLYPWQWAPADGEAFIDHLRSTTVEAVSTARSYEIDISLFMEYLLDPRYGWAGVCADQFGDVPQAIFHEGNSIQHKLDYEGDPRRRPLSYDEIQALFDAADARSGTIQGRGVKGALGAARDAAVLKTIYAFGLRRTEASRLDLVDLRRNSQAPQFGGFGVVMVRYGKAPKGAPPKRRTVLLVPEMDWVVETLDQWLTEIRPRFSPPDRHPALWVTERGGRLSPRSINEAFVAARDDARLDRSLNLHCLRHSAVTHWTEFGYPARFVQEQVGHAHASTTSIYTHVSNEYRNKLLKASLMGRLGDHWDGAPT

SEQ ID NO: 6025 - protein, 876 aa, synthetic construct; identical to SEQ ID NO: 6021
  REGION 1..876: note = TnsF-Tn7 System Protein

SEQ ID NO: 6026 - protein, 478 aa, synthetic construct
  REGION 1..478: note = TnsF-Tn7 System Protein
MANQRRASWPGEQLCYSCFHAAMRTRGICPRCGHDGALPGLATDGEHEPICLSCAGIPADFSCRGCGAEGDFYRRKTCARCALRDDLTALMIDGARSPQAMAPIVEALCGVERPASILTWKRSPRVQELLTGLASGDIPLTHQGLDEAGTDKAINHLRSLLEHAGILAARDEPLAWFERWLSTKLEAVTEPAVRAPVERFATWHHLRRLRKSSVPGQSTAGAARYAKQEITESIKFLTWLHSTHGRTLASCLQQDVDEWLATGPTTRSKVRNLLAWAKKAQLNKSVKITHQQALPSRGLTQDQRLAWLRELLEGDSESLSYRVAGILLLLFAQPLTKVAALRTSAITFTENDVRISLGKEPIPVPSPFADMLAGYVDSRPHLRAAGGLATSPWLFPSVRPGRHRQPQEIMERLARLGIDLLGARNTALQSLVVAVPPPVVAELLGYSYNTAQRHAEIAAQPWARYVTKAATHTPAEMA

SEQ ID NO: 6027 - protein, 478 aa, synthetic construct; identical to SEQ ID NO: 6026
  REGION 1..478: note = TnsF-Tn7 System Protein

SEQ ID NO: 6028 - protein, 405 aa, synthetic construct
  REGION 1..405: note = TnsF-Tn7 System Protein
MEDWAEIRRLHRSEKLSQAAIARRLGLSRNTVAKALDSESPPRYERAPVMTSAWAQIEPAVRAVLSEYPTMPATVIAQRVGWAGGHSWFSENVARIRSEYAPVDPCDRLVHLPGEQVQCDLWLPGRVVPDHAGVLRSFPVLVMVAAYSRFIAAVMLPSRVTGDLLAGMWLLLSQCIGAVPRTLLWDNEAGIGQRGRLAEGVAGFCGVLGTRLIQARPYDPETKGLVERANGYLRSSFLPGRQFGSPAQFNTQLADWLAQVANPRTHATTRMIPAQALGADRAAMAGLPPVAPSTGTTMTTRLGRDYYVSIGGNAYSVHPEAIGRMISVSASLDRVVARCGDRVVADHQRLWGTAGLASDPEHRAAASRMRETFRNRPAVAAHLDIEVQVADLGTYDAVFGTGEVA

SEQ ID NO: 6029 - protein, 270 aa, synthetic construct
  REGION 1..270: note = TnsF-Tn7 System Protein
MATKRAPAPGEADKLIAHQARLLKAPRIAAHYSRLAEQGRAAGWSLEDYLAAVLAVESNARAESGARQRIRYAGFPAIKTITDFDFTAQPHVDRAQIARLEAGGWLAEARNIVLLGPPGTGKTHLATALAIAAAQAGHRVAFAPATGWITRLAEAHRIGRLDAELRKISRIGLIVIDEVGYIPFDTEAANLFFQLVSTRYEKSSIILTSNLPFSRWGQVFGEATIASAMIDRIVHHADVIALKGASYRIKHTAIESLPSVEADRQADSTP

SEQ ID NO: 6030 - protein, 270 aa, synthetic construct; identical to SEQ ID NO: 6029
  REGION 1..270: note = TnsF-Tn7 System Protein

SEQ ID NO: 6031 - protein, 519 aa, synthetic construct
  REGION 1..519: note = TnsF-Tn7 System Protein
MLVCIDCGQQRRCRDGLATGQPRCGSCRGRGRPRKLCASCNKERRIHSRLPLGNVCGPCHTKIRHRPAACAQCAERRPLIGLDASGQKICGPCAGDAREWICTRCGRFDALFSDKQCPRCVVERRLRSLLSDQNGQVRAQLEPLLALLSTGPDAYQVLLLLYRAEWLSLLGRLAREHEEITHAVLDELPARQHVHYLRRALMASEILPDRDEYLDSVPSWLEAMLAKQPAHIARLIRPYASWSVLRRARSRSQHHESTPSVRKYARARILIAINFLTWLDGCNLTLGTATQAHVDAWLDGGTTTHYRLRDFLLWAHSRRLAAELTVPWLGSREDPDEILTDDHRWQLLRQCLSNDEIPLQLRVAGSLVLLYGQVPQHIVRITRSQLTTKGAHTYLTLEESPMLLPPPLADLFQRLAAAPVTSRSALRGLVKDSHLLFPGTGPGGGMDHGRLTLKLNQLGIRVRPARNGALCALASDLPAAVLADLLGIHITTAVRWVRLVKRDWTSYLASRDSSTQVGS

SEQ ID NO: 6032 - protein, 519 aa, synthetic construct; identical to SEQ ID NO: 6031
  REGION 1..519: note = TnsF-Tn7 System Protein

SEQ ID NO: 6033 - protein, 357 aa, synthetic construct
  REGION 1..357: note = TnsF-Tn7 System Protein
MVSGVVHLDPPPAVFRAMLEGWAVQQRTRFLKATTIQARIELVKRFAAYTNEYPWQWQAAEVEAFIDHLRSQPHPIVVSTARGYQNTLRLFMEYVTDARYGWQRVCEGEFGQIPTQILHEWNTVAHVTDYEGDPRRRPLTYDEVQALFDAADGRVQEIRDRGRKGALAAMRDAALLKAVYAFGLRRREAWGLDLTDLRHNPKAAQYGRFGALFVRWGKSSRGSQPKRRTVLTVPEMDWIVPVLDQWLDEARPLFNPGKLPALWVTERCDRLSRRSVNEASVDARDAAGLPVELDLHFLRHSYVTHLIEFDYPERFVQDQVGHEYASTTALYAGVGDEYRNRLLKRSLERQGNLWGAS

SEQ ID NO: 6034 - protein, 108 aa, synthetic construct
  REGION 1..108: note = TnsF-Tn7 System Protein
MIRKMGYHWHLRQVMAERGMFATTDLVPLLAERGVHLSREQVFRMVTQAPQRMSMDTLAALCDILDCQVQDLIEITVVHQQLRKTGTAAPTNAAPEIRRTSIRRPEGL

SEQ ID NO: 6035 - protein, 377 aa, synthetic construct
  REGION 1..377: note = TnsF-Tn7 System Protein
MVDGAADPIAMGAIVDILCGVDRPESILTWKRHPKVQTLLTGLSCGDIELSHDGLDNAGHGLHISHLRSLLEHHGVLAPRDAHLALLETWLAAKLDAIPASVVRAPVEQFATWHHLRRLRRDSTPGQACDPPKRAAKQEITETIKFLTWLHNHYQRTAATCRQQDLDEWVATGPTTRTKIRSFVAWAKKTKLNTAVHLDLQQPKSTRLLTQDQRLAWIKELLTGDVESLPYRVAGTLLLLYAQPLVRIAALKTTAVDVTQDQVRISLGAEPIPVPDPFAGMLEHHLHNRPNLRTSASLAGNPWLFPGYNAGQHLHPQTMLDRLHDRGISVLGARNTALQNLVAEIPPPVVAHLLGYSHNTTQHHARLAAQPWARYVI

SEQ ID NO: 6036 - protein, 377 aa, synthetic construct; identical to SEQ ID NO: 6035
  REGION 1..377: note = TnsF-Tn7 System Protein

SEQ ID NO: 6037 - protein, 1031 aa, synthetic construct
  REGION 1..1031: note = TnsF-Tn7 System Protein
MKFHGLFIGIDRYADLNIQWLSGAVRDARAIHALFADTIPDSSHVLLTDGDATASGIRAALAALAAQSGPDDVVFIFYAGHGSETHEIVCFDTDVRDLAGTSLPLDELADTLSGIEGTTILCALDCCFSGGLGSRVFATGARARGLTRSTASDILSRFVGTGRLVLTASADDEEAFESAVHGHGLFTYRLLEALQGVDEVRQGDQIDLLKVVSYVNQRVLADSAQMLEVQTPTLRGQLDGTLLWPTFIPGPQYGALFPDRVRQPATADPTSLAAFGVPQDVLDIWAANIDQLNELQLRAVNDFGVLDGNNLVVTAPTSSGKTMVGELAAIKAAASRGRTVFLLPMKALVNDKYEQFTRIYGPAGIKTIRATGDYSDQMSEFLRGQYDFALLTYEKLTHLALANPHVLDSISVVVVDEAQTLTDRTRGSNLEFLMTLLNNRRGRVGSPQVITLSAVVGDLGGLDRWIGGGHLHSTARPVPPREGVVGQSGALQIVNEDGTEATIPAFIRPIPHEGSCSLVIPLVRKLVGEGKTVIVFRETKGEVAGCAVYLSDALGLPAADGVLEAMNTGEVSSSTETLRRTLARGVAMHTADLDRTERHAIESAFRDPDSSLNVIVGTTTLAMGVNTPASAVVIVGLTHPGPRPTPYSVAEYKNMVGRAGRLGFSELGESYLIPNDTLGTGNAWHNYVHGELEPLRSQLVADGDPRTLMLRVVAQFQGESGHAVSEEAVIGFLDSSLAAQQAREGGNRQWTTEQLGYGFDQLVAARLLEAETDGYRLTALGRFTGESGVHVDSVVRLSSALAGLDATALNSTTLIAAAQLTVEVDAVYIPVSGRKNNPEPTVWVSTLSQQQVARPTLRVLQNTAPDIATMTRRAKKASAAIMLINGIDIAVLERNLNQHVWGRPAMAGAVRSAADRTRDLLPAVGAVLVELYPEHVDAIQSLVGRTLTRLEFGVPPELIDLARLDAGLSRQQLLALLNAGYANPQSVAEADIAALAEAMGSKEGADVLVEACRTAIGQPAPSGIELPTPSE

SEQ ID NO: 6038 - protein, 1031 aa, synthetic construct; identical to SEQ ID NO: 6037
  REGION 1..1031: note = TnsF-Tn7 System Protein

SEQ ID NO: 6039 - protein, 360 aa, synthetic construct
  REGION 1..360: note = TnsF-Tn7 System Protein
MYVVGSVPLLHVEAQTVREMLDGWRNQQLCRNLGHDTIEARIRIVERFVDHTNEFPWTWTPAMAEEFFSDLRSVHHRALSTTRGYQNALRLFCSYVSHPDYGWDRVCEQRFGTHPAQVFFEWNTAAHVQDNEQRPAKRAFTKRELQDFFDHADDQVALIAASGRKGWLPAYRDAVMFKVAYSYGLRFNELRHLQTVDFSRNPHAPEFGRYGLVHVRYGKAKKGSPPKRRSVLTVFDWTPEILADWLAHGQQCMDGGIDLFPSEKGALVAERTLLRRFRRYCDELDLSVGLDLHSLRRSYATHLIEDGWDAKFVQDQMGHDHASSTSIYTCVSSDFRVRTLRRALDTTITEALLLGDGKSS

SEQ ID NO: 6040 - protein, 270 aa, synthetic construct
  REGION 1..270: note = TnsF-Tn7 System Protein
MSPQRPDATPAVKPIEVSGELKALMRRLKLGQLLDTLPERLALARTNRLPHHDFLELLFADEVTRRDRESATRRAKAAHLDPAMQLQAWDDSAAVAFDQQLWAELTSLRFLADAYNVLVMGPVGVGKTFLANALGHIAVRRHHSVHIERADKMFKRLRGARLDGSYEDEMRKLHRVELLIIDDLALHRLEATETTDFYEIIVERHRAASTVITSNREPPEILTMMADPLLAQSAMDRLQSAAYELVVEGESYRQRQKPGNRKPASPTASD

SEQ ID NO: 6041 - protein, 270 aa, synthetic construct; identical to SEQ ID NO: 6040
  REGION 1..270: note = TnsF-Tn7 System Protein

SEQ ID NO: 6042 - protein, 270 aa, synthetic construct; identical to SEQ ID NO: 6040
  REGION 1..270: note = TnsF-Tn7 System Protein

SEQ ID NO: 6043 - protein, 270 aa, synthetic construct; identical to SEQ ID NO: 6040
  REGION 1..270: note = TnsF-Tn7 System Protein

SEQ ID NO: 6044 - protein, 117 aa, synthetic construct
  REGION 1..117: note = TnsF-Tn7 System Protein
MKRQVDYTWRLAEIMAAHGLHNSTALIPRLAERGIELSRPQVYRIVHQRPERVSLQLLAALCDIFGCGIEDLVTVTAADVRRRKTASTKAAAAPAPNVVNLNKSVRPRRARVIRDDD

SEQ ID NO: 6045 - protein, 388 aa, synthetic construct
  REGION 1..388: note = TnsF-Tn7 System Protein
MAAADGVIRPGMEAVFEALSTAEDPRSVLSWIAPRTRAASVLSQLGTDGFPVEHSTLDQYPRSKAVDYLRGVLITAGALPHRDEQMVALEQSLVEIFDDVSDADDRKLLQAFAQWDQIGRLRRRLAGRPATYNQINTIRVSVRQGARLMKWLRDHGTDLGKCSQREIDQWLSEGNSMHLHARQFVRWAVARGHVAGLIVPSPTRTNPTPPVDTEKRIELSQKLLTDATIPLDLRVAGLMVVLFAQSSTTIAKIRVNQVLQTAAGVHLAIGREPLHLPGAFGELVTQLAAERRAYSAIGRGSTSPWLFPGRHPERHLSPATLLQRLKAIGITARASQHAALRDLAAAMPESVINRLLGISISSVDRWKAGGQWAAYAAELARRGTPLRN

SEQ ID NO: 6046 - protein, 388 aa, synthetic construct; identical to SEQ ID NO: 6045
  REGION 1..388: note = TnsF-Tn7 System Protein

SEQ ID NO: 6047 - protein, 378 aa, synthetic construct
  REGION 1..378: note = TnsF-Tn7 System Protein
MIQSVSGKGVLVSDRHEPEGSARLQLVSGVSLLHPEDAVFDAMLEGWYRQQRGGRNLEHKTVSDRQARVRDFMDFAGEYPWHWNAGHMDDWSSNLVAELHRKPSTIRNYQSAIRLFCDYLVNPHYRWAEECEERFGTHPVQICHEWNTLAHLVDYEGDEDRRPFTRKELQAFFDYCDDRVERAVRKGRKGALHAYRDATMFKVIYAWGLRRTETSRLDLTDFHRNPKAPEFGRYGGLQVRYGKRTRGSAYRRREVLSLMDWAVEAVEDYVTNIRPRFGYPDHPALWVTERGGRVRPREIDDRFADYRKDMELAEELVPHCLRHSYVTHLIEDGADETFVQQQVGHRFKSTTAIYTSVSGDFMNTMMRQHLNQTLAPMG

SEQ ID NO: 6048 - protein, 112 aa, synthetic construct
  REGION 1..112: note = TnsF-Tn7 System Protein
MPSKLDYQWHLRELMAKRGMYSTTALQPLLAERGINLSTSQVYRLVTEKPERLSMKVLMALLDILGCPMDELIEPVTAAAARPRKAAGGELPSDPGVGTFRPKRARISGADS

SEQ ID NO: 6049 - protein, 479 aa, synthetic construct
  REGION 1..479: note = TnsF-Tn7 System Protein
MKDRACFDCGGTRYAHTRLPHGPICTACRRRRHYHHESCPACGAVRPLAYLADELIVCASCAGATSIFACDTCGREDHPYGAKRCARCTLRERLTDLLADPTTGQIHTRLQPVFDELVESERPQSGIWWLRKNPGTGPRLLRQMARGEIQISHETFRELPSDRAHDYLRTLLTAVGVLEPFEIRIERILPWIEKVTADLPAEQAALIQRFAHWHVLRHMRTAAREDRLTQTITDASRRRIRVAIDFVAFLETCGASPATATQDLLERYQEHTGTAFSHEHAFIVWLRDTRINTRLSIPAIARLAPTVTVSDEQRWAAVDRLLHDDSLRRYVRIGGLLTLLFAQPLSRIVTMRTSQTAVTDQAVHVTFNTTAVQMPPLLDDLIRQHLQHRGKSLYASRETGWLFPGGNPGRHLSTEAIRSQLVAIGIKPYENRKATLFCLAGDIPAPVLADLIGITHSNAAAWAGLAARDWTDYIAERSR

SEQ ID NO: 6050 - protein, 479 aa, synthetic construct; identical to SEQ ID NO: 6049
  REGION 1..479: note = TnsF-Tn7 System Protein

SEQ ID NO: 6051 - protein, 1888 aa, synthetic construct
  REGION 1..1888: note = TnsF-Tn7 System Protein
MSIHKLTAGSGYDYLTRQVAAMDATEKGHTSLATYYTDHGETPGRWMGSGMAGIDGLDAGDPVTAEQMKALFGYGFHPLADSRVTELGDSATTSDIKRVRQLGTPFKVYEADVPPYRMEVARRLEDANVAEGRPREAVVSLGERARMRTEVAREYFVREHGREPADARELASAVALYSRSKTTAVAGYDLTFSPVKSVSTLWAVADQATSAAIERAHNAAVADALEFIEQEALYTRTGTNGVRQVDARGLVAAAFTHRDSRAGDPDLHTHVAVANKVQTAKDGKWLAIDGRVIFQATVAASETYNTALESHLESSLGVRFEEREDTDRRKRPVREIVGVDPRLNDRWSTRRQSIELRRDVLVAKFHTDHGRPPTAVEAVQLAQQATLETRDAKHEPRSSPEQRAQWAEQATDVLGARGPEQMVASALHPVPLSPQAADARRVDAAWIERVAGRVVEGVQDRRSTWNRWHLIAEAQRHVRLTDVPADQVQHLMKLVVEQAIATCQPLKGVDDAVPEPEELRRQDGASVYTVAGATLYTSPRILAAEQRIVAAAGVHDRHRVAPVDVDLALAESAAHGVELNTGQAAMVRGMATSGARVQLGIAAAGTGKTTAMRVLTQAWETSGGNVIGLAPSAAAAAALREQTGTTTDTLAKLVDSLQRGAGGNLVDQIGTGSLVVIDEAGMADTLSLDTAITAVLERGASVRLIGDNQQLAAIGAGGVLRDIADQHGELKLSELMRFADLAEGAATLALREGLPEALGYYFDNKRIHVGDVATLTDEIFTAWRGDRATGKDAVMLAPTRDLVAELNARARAARLADIGASPGRELRLADGNSASVGDVVLTRNNDRRLRISATDWVKNGDRWHVEKVHGTALSVRHVETGLQVLLPARYVAEHTELGYASTVHTAQGISADTMHGLVTSDQTRQQLYTMMSRGRHESHAYVVVTSDGDAHGLIRPEALRPPTAGDVLTQVLARDESPRSATTLLAQANAAEARLQKVTEKYADAIYVASADHLGDDVVAGIEAQADILVPGLIDEPAWPALRAHLMLLQAQGGDAIGELADAVQVRDVESADDRAAVLDWRLDPTGRRDAEPGPLPWLPAIPNKLAKNALWGPYLGSLAHEIRKAADQVHAGTADADSPAWARHARLSPAAAVAGDIAVWRAATGVDKPDRRPTGPRQLQKAAVLYQRELDTRLDAGRRPAMDEWGPAIHALHPRSDSFTPLLAERLAAINRSGVDAADLLGRAASEGPLPDEHVAAALWWRIARHLSPAVAAEQNFSDGQLAPDWADLLHEHLGVEAASNVTSSPWWPTLVVTVEQAHERGWPVEQLLDFAKTSDVDGLDLAQAMIWRIALVTDPPPEHDTAIPEEYLPPEDLHELDSLEYEDDLRHSTELDELSVAAHDRALLEPAGTTGLGLDRLIDRAWELQASPVPVQRINAINAASADYFESQYFGSWAQLHVHERLGVDLAGDERFRPGFAPAGWTNLIDHLREHEFTVTEMLAAGVAKKASNGRLIDRFRDRAVLPVITAGRVIGFVGRRNPDATGDFAGPKYLNSPDTVVFHKGAQLYGISDDHVSHGAVPVLVEGPFDAIAVTIASGGAFVGVAPLGTSTTEEQAAQLAGLHATPLVATDGDLAGRIAAERDLWLLAPHLVTPRVVPMPIGADPASLLEQRGPAQLVALLQQHRDLAALLVDERLTNLADPRERSTNAAEVIAVTAPEQWEGFIATTASAGSLDPGQLRTDVAAAARSFNQDPQRYCTDKLGNVSQVRQRLEGHDKARPSDHWAALGRSLDSRLTARRDWPAAATLLQQLHDQGVDVEKVARQAVASRPLGANPSRDLRYRLAEHLDRSQNTGTAVPRTPTVPRTPTAPRPQDPRGPQQRPHRAPRR

SEQ ID NO: 6052 - protein, 1888 aa, synthetic construct; identical to SEQ ID NO: 6051
  REGION 1..1888: note = TnsF-Tn7 System Protein

SEQ ID NO: 6053 - protein, 374 aa, synthetic construct
  REGION 1..374: note = TnsF-Tn7 System Protein
MAVPGSAHLVLAPGVVHLDEPAAVFEAMLSGWGRQQRSRLLAEATIEPRVLLLRRFTSFAESHPWDWTAGDVEDFTASLMSGKTRLAPSTIRGYHLTLRLFCDYLLDGRYGWVAQCEQRFGSIPSQVCHDYNTAAHLVEYEGKPSRRPFSYDEIETLFGFLDDRVEQVARSGRKGTLAALRDAQMVKTAYAFGLRRRELCFLDVVDLRPNPRMPGWGTYGAVHVRYAKSSRGSAPRRRTVLAVPEFDWVIGGLAQWVEQARPLLNPGSRQELWLTERRQRISPKTMDKRFAFLRQQAGLAAELTLHCLRHSYVTHLIEFGYPERFVTEQVGHSYASTTAIYTSVSNDFKTKTLQAALGRVYGNTTHHDDNREQR

SEQ ID NO: 6054 - protein, 110 aa, synthetic construct
  REGION 1..110: note = TnsF-Tn7 System Protein
MSTKTVIRWNLRQLMAENGMFATTDLVEPLHRRGVEISRQMVHRVATKPPQRINLDLLAALCDILACTPNDLLELAQEQVVEPAASGDGGPGIGDLRPIRATIRRPSTGE

SEQ ID NO: 6055 - protein, 389 aa, synthetic construct
  REGION 1..389: note = TnsF-Tn7 System Protein
MVTELLTGPDGNLPDHLRPLADGICRTRRPQSGFSWLHNSPLVQQLLTDLATGVLPCDHAALDERLPSRAVDHLRGLMVTYGVLPPRDRRLAAFTRTMTIKLGAIGDEDQRRLIEQFARWDLLRRLRRHADRGPVPEGPFLAAKQVLTVAIGFLAWLEARGRPLSECTQHDIDAWFAGDTATVWNARRFLRWAQVHRVIHNVDIPCRAKENPTLVSQQQRLEIIRSLLLDNDLPLPERIIGCLVTLFGQPIHRITELRVDRVQDAGSGVRIQLGRHWIDVRDPLATLLRAHLATRLDRGTAAHPTSPWLFPGLLPGEHRSSRQVGDVLRAAGVPVRAVRNATWQQLAREAPPQVLADALGIYPGTAMRHATQAGADWVAYAANRARKAP

SEQ ID NO: 6056 - protein, 389 aa, synthetic construct; identical to SEQ ID NO: 6055
  REGION 1..389: note = TnsF-Tn7 System Protein

SEQ ID NO: 6057 - protein, 724 aa, synthetic construct
  REGION 1..724: note = TnsF-Tn7 System Protein
MTTDDDPDGGKLTADQVQAVHNKVTGSVVGPIVQAHTILGGVYCHAPSHRRPVPRQLPPAPTLFVGRAQELATLTCALDSAADMHRPLVITAIAGVGGIGKTWLALCWAYQHLERFSDGQLFVDLQGFAPSGRSMTPEKAIRGFLDALGVDPQSVPIDLDAQVGLYRSLVAGKQMLIVLDNARSTNQVVPLLPGTATCTVLITSRSRLSGLSMAYGASSVGLDVLNDTEACDLLARYLAYDRLVDEPAAVTELLKSCAGLPLALGIVAARACVHPRFSLAVLADELRDRPSRLDALDAGELNTNLRTVLSWSFDALSADTATVFGWLSLAPGPDISMAAISSLAALPDTKVQAVLRELENAHLLQQHVQGRYRAHDLVRLFAGERATLEHSDEVRAVTLRRLVDFYLHTAAAGARLLYPHSPVIELDQPASRCAPALLPDFPAALAWFDAEHQCLLAAQLLCVQRRWHQHVWRMSWALTGFCRRRGHLRDHVVACEYGVVAAEHLDNLADRAWAHQLLGYALSRMNRHSEAREHLQQALELARQSGDIQREANIYRVLARDWARDGDYERALMYAKRALCLYENLGIPVWSADSLNMVGLCQARLGRYGTAHTACVAALALHRRHDNRHGEGNTLDTLGYIARQTGRFDDAISHYNEALDLFQSLGDEYAEADAANSIGDVLASQSKQLDARNFWLRALKLYSAQHRITDADRAEQKLADLNGG

SEQ ID NO: 6058 - protein, 724 aa, synthetic construct; identical to SEQ ID NO: 6057
  REGION 1..724: note = TnsF-Tn7 System Protein

SEQ ID NO: 6059 - protein, 491 aa, synthetic construct
  REGION 1..491: note = TnsF-Tn7 System Protein
MKFQILGSVQLRHGGRQLRLGRAKERALLGVLLLNHHKRVTTDTLMHALWDHNPPERAHKDLQAYVSRLRAALRSQGCTAEILTQHHAYVLHADDDQLDLTQFKALRASAEAARRAGRVDEAARHLYEAIELWQGPPLADLHTSWAELVREDLDAYHRLPGYQLLCSVELDRGNYYDALELLDTITSGHELDTRCISLRLSTLNAAGHYAEFDSYWKHIYRRTVEAFGTGPGRELRQLHQQLLFERDALISEHPAVASVPAPLPPPAQLPPTIDDFVGRAEQLSELETLLAQAQLTRQPTTLIIAITGGPGVGKTTTALRWAHGIRDRFPAGQLYADLRGYADTPPRDPGEILGEFLQALAVPVGQIPAGVEARGGLFRSVLAGQNALIVLDDAQDSSQILPLLPGASGCVVLVTSRHRLAPLATRHGARRVALPPLAQAERLDLFRMIFARSRRQRTDPVALSGLADLSAGLPLAVRLLGERPSTWPRCR

SEQ ID NO: 6060 - protein, 491 aa, synthetic construct; identical to SEQ ID NO: 6059
  REGION 1..491: note = TnsF-Tn7 System Protein

SEQ ID NO: 6061 - protein, 479 aa, synthetic construct
  REGION 1..479: note = TnsF-Tn7 System Protein
MERYADAAVLLLGADPARPEQAAAQLMAWLSTTTRPWLIVLDDVQVPAEIEQWWPDPTKTGQVIVTTRYRGDSLIRVDRQVIEVGLYTFEQALEYLHRRLDHQPHLLADPRQRTSPDDLLAALAHDLGYLPLALSHASAYLREGQVSVTAYRMKFADYRTRLEKLFVPPDQFPDRYQDTVAATWTVSIHKAAELMPGGVVPMVMLLASVLDPDGIPRSVFASDAVGSWVRSVLRRAPEDGEVMSAVRMLHRFNLLTDNPAEGTTPVISVHGLVQRATRDAALRTEHAWLTTAHAASDALLEVWPDVERDTALAAALRSNTEQLVAVADVALWGSGAIGVLFRYANSLGRAGMETAAVAYLTRLAATARDRLGPEHRHTLAARQYLARWQGEAGDPAGAATALAELLDDMTRVLGTDDPLSVLTRNSLGEWQGRRGNSHEAAATLHANLNNTAHALAFRGGGTLFMRAQTSPSGAARAAS

SEQ ID NO: 6062 - protein, 479 aa, synthetic construct; identical to SEQ ID NO: 6061
  REGION 1..479: note = TnsF-Tn7 System Protein

SEQ ID NO: 6063 - protein, 276 aa, synthetic construct
  REGION 1..276: note = TnsF-Tn7 System Protein
MSPFAHWHLIHRHRRTARGHAGQAVRDSHRRSQIRRALELLTWLDEQGIALPDLKQTHLEQWLVSGSPNRRDVRVFVLWTNERGLTSSLEVPTRSPEDPATFIEDDDRVEQLRRCVNDATLPLDVCVTGSLVLLMGLQVTRILELTIDDVVVQDSAVQLKLDEGFLKLPPRLAHLVRQQLHHAEDAWESNRAASTIPWLFAGLNPARPIQSQYIYLKLRRLGLGGLAGRNSARHALAADVPASILAALTGTSIDNATDWTNFVTARVLPGALRMLY

SEQ ID NO: 6064 - protein, 189 aa, synthetic construct
  REGION 1..189: note = TnsF-Tn7 System Protein
MVADRRPITADQVVYACNALTAAAGLLNWLHGRGQTLAICTQDDIDDWLVIDAFSRSRGFVTWAVDGGHAHNIEVPPFHNEPVREVFADRDQRWSLARQLLHDDSIALPDRVAGLLVLLYAQRAARITQLTIGNVTVTDDGVELLLGKASIATPEAFGDLLEALVNDRRATATGSQDRRTRSGSIRHHG

SEQ ID NO: 6065 - protein, 189 aa, synthetic construct; identical to SEQ ID NO: 6064
  REGION 1..189: note = TnsF-Tn7 System Protein

SEQ ID NO: 6066 - protein, 423 aa, synthetic construct
  REGION 1..423: note = TnsF-Tn7 System Protein
MLTNLLHEQLVCAECAGAPVTMACPGCGSVEESRKHHLCAQCRRPIVVQRLLSDETGEIRDEMRALADYLISHHPRAESLSRWVDNSSAAATLRDLAGGTLPLEPAAIIERAGSAQSASFLLSLLVLSGTLPDLDVQHARFEHWLRGWFASLDAPEDRLLLRQYSAWGLNSTTHSTPRGTAKARYQKQRAALKYCAELLRVIRAHGHSLTTYPQRGLDAFLTDSPSQHDALAPFTRWLRQNRMSHLRVEHRKNQLAGKGFESDHRWQMARLFLRDTHISPVDRVGALLVLLYGMHLTRIVTIERTQVSVTQDRVTLTIGKEPIELPHALGEAITDLLNLSQPRSERWLFAGRNPGAPLTAGALGKRLNRHGMRTGSARVTALLELAQQMHPRVLSDLLGISTTSATAWWRLAGGDWASYPALR

SEQ ID NO: 6067 - protein, 172 aa, synthetic construct
  REGION 1..172: note = TnsF-Tn7 System Protein
MIVWLNGTHGAGKTTTSALVQQLIPDSRVFDAEKVGETLMDISPGLPAADNFQHWPPWRPLVVETAKRVLDYTGGTLVMPMTVLVEEYWREISDGLAHHAIPVRHFVIHADQDTLYARIAGDHAIPSPFRLNYLEPYAQAARTWLHAEAEVIDTTHLTPSQSAQQIAEALGS

SEQ ID NO: 6068 - protein, 172 aa, synthetic construct; identical to SEQ ID NO: 6067
  REGION 1..172: note = TnsF-Tn7 System Protein

SEQ ID NO: 6069 - protein, 349 aa, synthetic construct
  REGION 1..349: note = TnsF-Tn7 System Protein
MNPEQTVFEAMIDGWRNQQQSRGLRAATIRARLAIVTRFREFSDKPPWQWRVSDLDEFTETIGGDKRALSTMRHYHGAIRVFCEYLTNPHYDWMEICEAQFGELPSQVCLPWNTVAHRFEFEGDAARRPLSYEEVQVLFDTADARVEALVTSGRKGALGALRDAQLLKTVYAFGLRRTEAVKLDLTDLHHSSAVPGWGRFGAVHVRWAKASRGSAPRRRTVLLVPEFDWWVQGMQQWVEDARHRFAPGDLEAIWVTERRTRLTAGFLDRRFAALRDEAGLSKALTLHCLRHSYVTHLIEFGYAERFVQEQVGHAQASSTSIYASVSSDFKNRVLAKALKNLVEGDGRDH

SEQ ID NO: 6070 - protein, 99 aa, synthetic construct
  REGION 1..99: note = TnsF-Tn7 System Protein
MASRGIFQTSKLGPLLAERGIDLSREQVYRLVAQTPQRVRLDVLSALCDALECSLDDLVSMKRSTTATQRIAVGEQTRGSIGDLRPLRATVRRPGPGQV

SEQ ID NO: 6071 - protein, 451 aa, synthetic construct
  REGION 1..451: note = TnsF-Tn7 System Protein
MIGINSAGQPICGPCAGQPDRDYTCQRCGNSGFFHTTGLCLRCQVSDRVRELLADTNGTIPVDLLPFTTALTNTGSPSAILQWLSPDRPATRLLEHLHATGESITHHQLDQLPQDLTLHHLRRTLMHTGVLPDRVEYLERLVPWLEQLLTDQPEARAHILRTYATWTVLRRARRRAAHQPFTYSSSNWARNRILVSLRLLQWIQDQHLDLSDVQQHHIDQWLTSGSPESTYLAREFVRWARQRRLVGDITIPKRRHRSALPPITEDERWEQLRRCLHEDTLPTAIRAASALVLLYGLPLSKVTVLRHNDIHTDDRKRVWLRHGSHQLRLPPAIATLLLTQRNHPTTIAAVNRNHPDDTKWLFPGSFPGQPARDSLYRGLRSHLHLHIRRARSAALAHLAAEIPAAVLAQLLDLHINTALAWATYAQNDWSTYLTARTRATNNARNKTTRPD

SEQ ID NO: 6072 - protein, 451 aa, synthetic construct; identical to SEQ ID NO: 6071
  REGION 1..451: note = TnsF-Tn7 System Protein

SEQ ID NO: 6073 - protein, 1029 aa, synthetic construct
  REGION 1..1029: note = TnsF-Tn7 System Protein
MNSYRIPSDVERPDRILGPLTARQLALLSATGLVLLLIWATTRTLIPITVFAALAAPIAAVATAIVLTTRDGLSGDQLLAAGLHHHRRARHLIATHAGDDAPGGAVPRWVTDRARGPRPPTAHPITPGTAGLPSTVTAGTGVSGGVGVVDLGEEGIAVIAAATTINLALRTPAEQAGLVGALAGYLQSLSGNGVQILLRSVRLDVTGHITDLHTAAQTMPSSLAEYARDHSRYLAELAEDDTTGQRQVLLVWREPLDPATRLAGSLVGGLTARGRCERRISAQGRHAAESRLLARLSDATDLLAPLGVGVRALDDSQARAILTSCTNPANLVPYGAAGAAGATEIITTEDGQYTGLQFDPLDTGDEEEDDSLGDGVRGLGPRTRRGRMPRRGGGGVEFAPESLTIGARHLQVGSDFVATIAVTGYPREVTPGWLAPLAAFGDRVDIALHIEPIDPRQAALQLRRQLARLESSMASAAVNNRVSDPAVEVAAEDAAALSAQLARGESRLFRAGLYLTVHATSENELTAQVTALRTVAASLLIDTCPLTYRAVEGWTATLPLGLDPVRLHRTFDSHALAAAVPFASAQLPPADPVSVTPAGVLYGRDGAAGLLFHDRFAPAMHNHNEVILGRSGSGKSYLAKTSILRSLYRGIETIVIDPEDEYAALCEALGGTHIRLGAPGVCLNPFDLDIHVGPSGHRTATADALLRRKLHLHTVIAVLLGEQTPAQRAALDTAVTATYAAAGITDDPATWVRPAPTLSMLRDQLATGTPVAADLAAGLAPYVGQGAFAGLLDGASTHYPAGALIVYSLRELPEELKTIGTLLALDATWRRVSDPSLRRARSVVVDEAWLLMRQRSGADFLYRLAKSARKYFVGLTVATQDAADVLATDLGKAIVANAATQVLLRQAPQSIDQVGDAFALSDGERRFLLSADRGQGLLATGAHQRTVFGTIASLAEHQIATTSPEYDLPGTDQDAGYLDLDLDAEDTRIDLDLSSPTFDTDDPVRLGAQVLFGEDDEWDTAQFTEQETQ

SEQ ID NO: 6074 - protein, 1029 aa, synthetic construct; identical to SEQ ID NO: 6073
  REGION 1..1029: note = TnsF-Tn7 System Protein

SEQ ID NO: 6075 - protein, 850 aa, synthetic construct
  REGION 1..850: note = TnsF-Tn7 System Protein
MTPSLHTQTPPPDSGGGGGVIGKFLTHPGLRVGHLLSLAEQHAFSLAAVLVATVTAVVAVAVWVRRRRERRWAEGARHVEILVPPQVQPDGATVLWEQLHGAIARRWWQRWLSGQHLLGFEYRISPEFGARIRLWVPSCVPPHLIENAVTSSWRGARTHTTPATPPLPLAPGGHRNLLAGGELRLARHGRWPIRTNAPGDPVAFLLSAAAAMEPGTTACVQVLARPVTTRPTRQTAGGSGTPAALGQFLLEAGRELFGLFAPGPVHRTGTPARTGSARYGVRDRQVSLEQSAQDHAAATKASVPQWATVVRYAVTAPVSLDADHATRARDMVRGRAHAVSAFLSSASQHNHYLRRWRRGAGVREAMFWRRLGRGDLLSSPELAVLAHLPTDAGIAEIHRAGARALAPSEVVAAGGPGTKPLGRADATRGRAVAMRVDDARHHVHVIGPTGTGKSTLLGQMVLADAAARRGLVLVDPKGDLVSDVLTRLPEECAGRVVLFDADSASPPPCINPLDLTTVGGDLDQAVDNIGSVFGRIYHQFWGPRTDDVFRNSLKTVCAQARPATLVDVARLLTDDTYRARLTADVKDPLLQQFWGTFEALGESGRAQLIAPLLNKLRQLLMRPFVRSALAGGPATVDLRAALDGGGLVLARLPKGRLGEDTTRLFGALLVARTWQAATARADTPATQRRDAALYLDECHNFLHLSTPVEDMLAEARGLRLSMVLAHQNLGQLTPTLREAISTNARNKIYFALSPEDSRDLARHTLPQLGEHDLAHLDAYHAAARLIVNGQNTAPCTVETTPLPPPVPGRARRIRAAARAHTTPRPHALPASAPRANSSAPQVPRDDPRRR

SEQ ID NO: 6076 - protein, 850 aa, synthetic construct; identical to SEQ ID NO: 6075
  REGION 1..850: note = TnsF-Tn7 System Protein

SEQ ID NO: 6077 - protein, 372 aa, synthetic construct
  REGION 1..372: note = TnsF-Tn7 System Protein
MARQVDLPGAVHLVLDSSVRYLDPAPAVFEAMLEGWRRQQKSRFLSQDTIEPRVRLVRRFAEFTNQYPWQWLPGELEAFTTDLVSRERPAAQSTIRSYHGALRMFCEFLTDARYGWIAECDNRFGQTPIQIAHEWNTVTHVVDYEGRPGRRALTYDEVQALFDAADARVETIRARGRKGALAAWREAATLKTIYAFGLRRREAACLDVADFRRNPRAAQYGLFGSVQVRYGKASRGSPPKRRTVLTVPEMDWIVDVLTEWCEQIRPMFNPGAHPALWVTERRSRISVRSINDAFCDAREAAGLPPEADVHALRHSYVTHLLEFGYPALMVQQQVGHAWGSTTAIYTSVSDEFRNRLLEQSLQGHPELWTETP

SEQ ID NO: 6078 - protein, 176 aa, synthetic construct
  REGION 1..176: note = TnsF-Tn7 System Protein
MPRLTLPPQVINQDQGPLHQHRRLAILRRALNDDSLPLRARVAAALVLLYAQPVTRIVRLTVDDVIDDGTTVTVRLGDPPSPLPEPVADLMRAYIHSCRHLPYASSRSSRWLFPGRQLGQPMNPVSLQVHLREIGVPPQRGRTSAIRQLVLLRVPATAMSVVSTQFIQVVDHPQPG

SEQ ID NO: 6079 - protein, 305 aa, synthetic construct
  REGION 1..305: note = TnsF-Tn7 System Protein
MTSIDVHDLTKEYGSTRAVDRLTLSVEPGRVTGFLGPNGAGKSSTMRLILGLDHPTSGTATVAGRPYATLREPLRTVGALLDAQAAHGSRTARDHLRCLAVSNRIPGRRVDEVLEETGLATVAGRRVKTFSLGMRQRLGIATALLGDPPVLLLDEPANGLDPEGIIWIRALLRRLAEEGRTILVSSHLMNETATYADHLVVLARGRLLADVSMPDFIERHSRARVRVRTSDPARLRAALLAGGFTVLEGEDGGWVVEGAKAEQIGAMAAREGVTVSELADERASLEQAYFALTADQAEFTAATTR

SEQ ID NO: 6080 - protein, 305 aa, synthetic construct; identical to SEQ ID NO: 6079
  REGION 1..305: note = TnsF-Tn7 System Protein

SEQ ID NO: 6081 - protein, 542 aa, synthetic construct
  REGION 1..542: note = TnsF-Tn7 System Protein
MAVEGAAHLVLADGVVPLRPAEAVFEAMLAGWERQQRARLLATSTIRTRVDLVRRFAVFTGTSPWEWVAGDVEDWATELLSAPDALTRSTVRNYLNQIAMFCDYITDTRYGWAERCLEYFGTHPVQSCHEDNMPSHSAPYEGRPEVRALTRRELQDFFDYADEQVVRIRAAGRKGWVPAFRDATVFKVLYGWGLRRREAAQLDLADFSRNPKAPEFGRYGACYVKFGKAVKGSPPRRRTVLTVWEWHLNGSPLQPGTASRARAGLAATSRFLTHLRRRGRTLANCRQADLDAWLASSRLANSTRVFWSRAIKTRNMPFLEIPTRIMAEPSQFTPDDHRWAQARRLLNEDALPVADQVAALLVLLFAHQVSRIARLTRGHVHHRDDGRTELSLGTTNVVLSGPLAELINRLPTRAAMALPATSTTEPGYFPVAGPASPSTPPVWPAASLSLASTPVRIATVPCSTTLASSRHPPSADFSDLLREPSIGGRRSPAVDGPATANQPDAEGRQASIRIRTRAPTSGRDWNVCWPSGPRWRTAGCPG

SEQ ID NO: 6082 - protein, 209 aa, synthetic construct
  REGION 1..209: note = TnsF-Tn7 System Protein
MRVRPISPEALVREVAERIDDRPRTGWTRVAVDGAPPSRPGWLADELVAPLRLRGRPVVRVSAADFLRPASLRLEHGRTDPDVFYDDWLDVGGLRREVLDPLGPGGSGRVLPALWDSVADRAYRLPYQSLPEGGVLVLDGTLLLGRGLPFDISVHLWLSAAALARGTGEGERWRLPAYARYEREVRPGGHADIVVRADRPGHPALQVSG

SEQ ID NO: 6083 - protein, 209 aa, synthetic construct; identical to SEQ ID NO: 6082
  REGION 1..209: note = TnsF-Tn7 System Protein

SEQ ID NO: 6084 - protein, 542 aa, synthetic construct; identical to SEQ ID NO: 6081
  REGION 1..542: note = TnsF-Tn7 System Protein

SEQ ID NO: 6085 - protein, 476 aa, synthetic construct
  REGION 1..476: note = TnsF-Tn7 System Protein
MGTINDENKIILCFGCKCELETAKRKYFGKYFCNYCYQKYFIKKTCFTCKKQKRIYKSEQVCQSCLTKIMPCIHCSKTGVKIGLILDAGIVCNSCAYHFRALRICDLCGQKKRNVHIYTIIDEIKKYCYQCVKFKFHEKCTACKNKELIHYCDLQRQPYCKRCTLIEKTCQICHQRIPAGKRANKCNSCSYKILLNSRTKKALHGLEPNVMNLFECLFNHLYDHKGVENTAKVIPYLHPVILQINNYFLQYQKLPNMLSVDLLKTSKFKHYHFILSFLHDYMSQDYKDFKVSQMISRQTNKLNKNSPHFNEFKKYIAKIQKRQITLHSKRLAITSAVMILTFTKLVGANCLCQKIVDQFCWLYWGQRASITGFINHINMTCNLSLKIKKEEYFKFEQRRESKMRLEQQILDICIELKVIDKNTLLKKILAYMHNIELPKDLEKLDLINIMSLKDKIRLRNLTFPLPLIDYYKIKCY

SEQ ID NO: 6086 - protein, 905 aa, synthetic construct
  REGION 1..905: note = TnsF-Tn7 System Protein
MKIEVASLDSDTTKDKGDLLEKLASDLLKAQNYEVIEEIKVTGAELDLLCKHNVSGKKIYVECKAQKEKIGAPILRQLLGTVIAYDYTEGWIISTAEFGKEAKGFIDMFKQKPGIQATQLSFYSPELIITTLSKASIIVPEPIERAKELTLNKFELGDWVLLISKYGKFWCVYILMGGVPNDVLVFCAKKGSLITDKLILENLKKLKSSIAEFSLNPIIETNKKDKENHISINLLPTVIEVQTGESWIDYRPARPEDFVGRDRLQTELLDYLKDIQNKKLRIFAITGNSGLGKSSLIAKLRDRSRNQHYRKRIFIFAVDIRGARNTAYIHASLLECLRQAQKNNFGDQIELQITNPDAPLNSPQIIDYLNSLEQNQQTICLVFDQFEELYSKVDLFDIFKTAKNLMLDVAGIQKNFVLGFAWKTDSTTQQDHPAYYMWHELSDYRIEYKLDVFTNGEIAKSLTKFEKSRNKKLPIEIRHQLTESSQGFPWLLKKLCINLTKSNRKDNIIDLDVTKLFEDDLEKLTPQQLTCLKIIAHNAPADWSEIIELSSVNDVNALVNQRLVIKSGDRLNIYWDIFRDYLITGKVPIIPFNYIPTTDPTSIFKVCRALPTNTYLTSESLAELTNLNTRTVWNIGADLTMLGIAERKGTEFKLHSKIQTYDKDHILMVLREKFDKHVVKIDLYKKFSGQSISMDKVKDVVKDCFMRKKHADKTWNVYTNRLVNFLVYTGYLTRSNQDVTVGDLGRPFADLRNLSTQRRNKGKAFTTTISPYKVYEVLKDLKNGTNKNELELKASIVLRRYNLIFVKNDLTYINQELINKHGGVKEALWAMAKNEKAFSLCLEILKEQPNIDRVTLAKLIAQRFNLTWAESSLKRNGNIFLQWSSWIKEGLETSLVPVPPGKRGD

SEQ ID NO: 6087 - protein, 905 aa, synthetic construct; identical to SEQ ID NO: 6086
  REGION 1..905: note = TnsF-Tn7 System Protein

SEQ ID NO: 6088 - protein, 233 aa, synthetic construct
  REGION 1..233: note = TnsF-Tn7 System Protein
MSIKNNYKSVRKPRPVYGSVSGYFAFRGQDTIWFESTLERDLIQKLEFNDNVMQVVSQPIEITYRTNLGNLSTYTPDLLVQFFESPLQQSPLLIEVKPRAKLRRDWKILKPKLKAGFQYAKDRGWDFRIYDEFRIRDTLLANIQFLKRYRNSDFQKDESIQILNRLDDFGAHSVNGLANSLFKADQKILQAIAHIWFLVERRYISCDLTQQLKPTTMIWVNNERKDDLIQEYV

SEQ ID NO: 6089 - protein, 632 aa, synthetic construct
  REGION 1..632: note = TnsF-Tn7 System Protein
MIQENITLDRRLLELKIGTVVWWKGNEYQISDILSFSEVVATHLETYKSSIIPINELGLDKVENNITKLSCDDIVISEKDWSTALKRYSIIQPFIDESSKTEIIKLAEEEGYHYTTIYNWLSAYRKTRSILSLVPNKRGWKESKTRLKDTTELIIKQVLKDYYLTEQKPRLSSVAETIKALCIKNNIDPPHPNTVRYRVRQINEQLKVKSREGKKSAQDKFTPTIGHFPHANHPLAVVQIDHTPLDIIVVDETHRLPIGRPFLTLAIDVYSRMIVGFYLSLDSPSATSVGMCIVNSILPKNRILLEHDINATWDVWGVMDTIHSDNGADFRTEFMQRSCLKYGINWEYRPIGKANFGGHIERLIGTINREIHLLEGTTFSNVEMKGAYPSEKKAALTLRELEQWLVSWITRIYHQRVHSSLDIPPVKKWEQGIWGTKEHAGTGLKPRINDEFTLLIDFLPEYKRTIQRYGISLDNLNYYSEILRKWIACPDPDNPKLKRKFSFRRDPRDISYIWFYEPDLKQYFKIPTAKKEIPSISIWEYESVQKSMRELTTKDLSNQDHIYQAILESKEMIEIASSKTKKARRQYEKSQSRDKKGSKIIPEKSIEKSPKVLMALESSFWDDPITTFDDIE

SEQ ID NO: 6090 - protein, 351 aa, synthetic construct
  REGION 1..351: note = TnsF-Tn7 System Protein
MTLWFIQPYQDEILSSWLIRTAISHGCTPLTLTHSIWGNSWRPWTTDFDLNIPKQKLISLSSSTLSTQELLKLTLQDINQKINTDNSQARKWITKLGIRNLDRTGGLRFCPLCLSERGYIKKLWRVAWNIYCEDHNILLQSHCEKCSLAFTPHKISFDNLDMTRCSRCDHQLSKQIYEFQSEEIKEIQQELNIMLLQDKNECSTENFHELLTMYAFFIRFTNSSSLLRSSADQKLIEDLGLNFNKKTDTKEEIEKMSSEWFSELMKILIIIRGKSIKDLSEYFKALGYTQQSFTSRLPNQKLAFIQSFIDLLPSRFRAPKKITKTRLIEVVTPLPREEVMKKWELLMMRIK

SEQ ID NO: 6091 - protein, 303 aa, synthetic construct
  REGION 1..303: note = TnsF-Tn7 System Protein
MSELQHLQEHIKPIVFLPQKDRITYLYSDKWIGYDRARSIMALLDDILSQPKRIRPQSLLIVGEPNIGKTTIVRKFVERHPQTNIHNQLNEIIEARKHHLLIDAPIGADEKKLYIAILEKFLVAFKRTAPAIELRYQVNHLIRKFHIKMLIIDEIHNFLTGTALKQREVMNVLKNLSNELYLSIVGVGTKEAVQILYSDPQHASRFDITELTSWGLDNSFRKLLASYEKLLPLKKPSNLAERELTTAIFEISSGNLGDVIRLLIDCSKEAINSEKEYIDIGIINQFRKQKNTNSYRSIRTIML

SEQ ID NO: 6092 - protein, 303 aa, synthetic construct; identical to SEQ ID NO: 6091
  REGION 1..303: note = TnsF-Tn7 System Protein

SEQ ID NO: 6093 - protein, 359 aa, synthetic construct
  REGION 1..359: note = TnsF-Tn7 System Protein
MIVKKICFHCKYRRPVYKYSTSKQPICKICSIEIYRHCKKCNILIPAGSGNYCKKCSSLNAIKNKLNSNGISLIYTENIFREFCYWLAQYRDPHFSSINMQHFLEHFKLIDKLYIKNNNFPSYRDILFEYLIQEKNYSNIIFSFLQEKKVIEKSSIDKKAYQSLKTIRLYLKEHKNSDSLLSKTFINYYLYLLNKPKTSTTSVRLALTPANTLIHAHILFNLETFNEVAISSFIFMYPGYKASITGFINYLYKNRFIKYGMIDIPKANLVKTRKSKAYLKLQLVKILKNKDHSLKQRLQTISLCMEYFHKLSLPKYTYITNKIITKKQNKYFLKVQHENYYIPLNRKEFTHFHNALALR

SEQ ID NO: 6094 - protein, 579 aa, synthetic construct
  REGION 1..579: note = TnsF-Tn7 System Protein
MRQLNNKRELDFLPDDNKYRVIWTVEGFLKSGRSEPNIVLVFRYLNRGEIYGFEKYVVPYKYMCICIAGQVYKGRESIEIPLLTKDGKLEKISFCDNEVYYVEEASFQIDYNNPVHHYSTGLIDSKKYILPFEMLKPSVKRHFFPIEGSQTSQITQLISNDGKIIYVPTFEVFQKMLVPQNKEIQRKILVSHIDEITKEYLVLENCSKTDDNIYKVQFKKKHERLKEASKHFIACMRFDKQTERLVNKIFAYVQSNYDGNTSIMPEVEPYTDMDITARGIWLDENVFLVLNVKAIHLGEKIKLSEIHDDYTNNPSGNLRKSFNRQMNIHENDLPYDNLNDPGANAGLQKVISNVIVQTNISILNSFVEKESKGSVDKSFLDENDPVAVSFGDESNACGSKNTARCFDYEVSNADLDGGLVFIYETLLRLQRASYIDNVNCLSDRFEVKQGFYLNTFPKRLLPNRKNSWLLKDDGNLRRYLLARVTLNSGKDIVLFEIEKRKSNEAFCGIIFAELSDLFRKLNIFLEFVTKSSGRFRERLYGRLVDKETPINESYIFSHSFKDGRLGDILISKLKRYENE

SEQ ID NO: 6095 - protein, 230 aa, synthetic construct
  REGION 1..230: note = TnsF-Tn7 System Protein
MKIKSNYRDIHYTYSSVSGNYPFRLEKTVSFESTLERDFITLMEFNPLVLDLTEQPITFQYNNLNNREASYTPDFKVDFSADTSLPSSYIVEVKPRKFIKANWPKLREKFRLATKYAKENGYIFKIYDENKIRSQYLNNIKLVNARKYIEYSLEEEARILEHLSLSGHLSIDEILEYLYVTREQKGIALGQILNLIAKHCICCNMNLPISRSTIIWCKNKENFYESIHYR

SEQ ID NO: 6096 - protein, 619 aa, synthetic construct
  REGION 1..619: note = TnsF-Tn7 System Protein
MSQYTIDRSKVVIKPKQYVKVKNDIFRITQTIDFETVVGVNIKTGKAKSILVHEIKNIIDKNEITSDGQDVSSYTDTQWQEIERRFEIIKPLLGVSTTKEDIETVAEKNNIHFTTIYRWLRNYRISGAITSLLKQKPGSEVGSSRISQIADMVIEKTIEEYYLTKQKPCIQRIIELVHIECHNKNITPPSKNTIRSRIAKISNEERLKKQGNKDIARNIYSPAAGSFPHATNPLSVVQIDHTLMDIILVDDENRLPIGRPWITLAIDVYSRMITGYYLSLEPPSEASVALCLTCSMLPKDKLLLQYEVDADWPVWGIMNTIHVDNGADFRSDSLRKSCLSYGINIEFRPVGKPNFGGHIERLIGTIVKKVHSLPGTTFSNISERGNYDSDKNACLTFKEFEKWLLLFITKVYHQKKHSSLGMSPLQKWEDGIFGTSEHTGCGYPTKPNNQDTLLIDFLPIFNRTIQRAGVNIDGLSYYDNCLRPWINYISSSSKQKEKFIFRRDPRDISYIWFFEPQLKQYFKIPLADQSIPPISLFEYKSVKSTLKTQRAKITSSNVLLALEEMQHHVKTSASASRKIRRQKQRKDNIKEQLTIKKTPITNSTNHEDDLWDDDVEAFD

SEQ ID NO: 6097 - protein, 348 aa, synthetic construct
  REGION 1..348: note = TnsF-Tn7 System Protein
MDLEKENRWPIVLPLYDDEVLSSWIIRNSIANGSDPISFTGALWNNWRCWSIDIDTSISITQLSILSKASKISIKKLYTATLKPFKSDTKKTMYQSWIIPLGSRNRVKTNGYFFCSECIKENRSYMKRGWRFAWSISCSKHKILLSQACPKCNFPFSPHLIKYYATSTRHCQHCGYDLANSKNVRVKNSLFNFQENLDNAATPFLLNTNTYNEQLLLLRTLITFIQRSISRPKSFNNFLKEMSISEKIDLSHFPFERKSIEERYLILNILTKICLMTLNELISTLKKSKVTKTMFIQQTVSCPTIEHIVRKLSHSGKPRKVKAFIKNQSCPTPEHIVDDMMIEILDML

SEQ ID NO: 6098 - protein, 265 aa, synthetic construct
  REGION 1..265: note = TnsF-Tn7 System Protein
MLFISTNSWIIDIFYGRLSLILGIVSNKIIDLYRSILALILGIDSGSNPMPGEISLAHNGVLFLDELPEFDRKVLEVLREPLETGVVNISRAKCQVEYPANFQLIAAMNPCPCGYLGSQYKECSDSIQSIKRYQSKLSGPLLDRIDLQVEVLELAKEDLTNQELRGEKSSIIRERVKKARDIQITRQGKINSMLTSKELDEVCDLDEESKKMLALAIEKLGLSARGYYKILKVARTIADLSGCQKIEKLAIQEAIGYRKMDKFFK

SEQ ID NO: 6099 - protein, 298 aa, synthetic construct
  REGION 1..298: note = TnsF-Tn7 System Protein
MSEYLHLDEETKKIIDESTDKRIDYLYRPVWINYPKTIDIVKLLNSLLRRPKQPRMQNLLLIGESNMGKTSLINYFHSLHPNYTSEDEEGMSIANKTLVIAQSPATADEKGLYMSILDTFWTPFRPTDTTAKLRYQLIHLMKLCNVKMLIIDEIHNLLSGTAAKQRAVMNAIKNLGNELLIPIIGIGTKDAALVLHSDPQHASRFDIVTLPKWDLDKDFRSLLKSFEMKLPLKEASNLASKEKATLLYTISEGNLGDLHKLLIECCITALETNVESITVDTIKKHKWVKKTHGLRKRK

SEQ ID NO: 6100 - protein, 298 aa, synthetic construct; identical to SEQ ID NO: 6099
  REGION 1..298: note = TnsF-Tn7 System Protein

SEQ ID NO: 6101 - protein, 790 aa, synthetic construct
  REGION 1..790: note = TnsF-Tn7 System Protein
MLDRLIRELRARGATEVVLVCCASCGKSATKMTTRDNNGLRICGTCLHRVKGTFTPHPCARCGAVVIPCFYDRDGRPRCGRCPPDPGVDHVQVISEIVIALSPRTDRALLSGVIAATVRQGAKRRQLAWALQDHPELLTGAGAEGPAIVRRLVAALIAAGVENVLAPACPRCAKTNAITSLLEGSPCCTSCYQRARAAECVRCRAVRQIRTRTSSGAPLCDRCRREEPCNKEVCSVCGELAAIATHGGGAPVCVSCHQLPSAMCSQCGRKQPCHFAGSDAPRCLACYRRARAAACVRCGNVHPINARDGAGNPLCANCSRTRGACCRCGRTRIAAARIAEGSVCRPCAKAEPECWRDCTACGNLAWLHHRGLCEVCAAPRLLDAALSGPDGKLATDVEPVRDALAASRPRTLLNWLSRPRAAPMLTQLAVLVAAHGALTHETIDQLTPAGPARYLRQVLIAHNVLTPRDRHLTYLTQWLAQKLHEVPDPGHQAILRRYVRWTHLRRLRTASETTSPSAAASIRYEVKSIVQLLHWLDERGRDLRSCTQADIDDWCARGGPRPRQARGFLLWCARRGHTGPLCIAAPIKSPHPEIFADEDRRWRLARWLLHNDGLTTADRVAGLLVLLYGQPASRIVQLRTDDLLVTGQRVQLRLGRAPLAVPGPLDALLLELRNTRRGKAALGHTDNHPWLFPGGLPATALHPSELAKRLRALGIPVRTARNTALIEHAATLPAKVLSELLGLSITAAVRWTTLAAPGAETYAADVIRRQPKSRRPIRDAPWALEPGAGT

SEQ ID NO: 6102 - protein, 790 aa, synthetic construct; identical to SEQ ID NO: 6101
  REGION 1..790: note = TnsF-Tn7 System Protein

SEQ ID NO: 6103 - protein, 180 aa, synthetic construct
  REGION 1..180: note = TnsF-Tn7 System Protein
MIESFAWTVATGGDRPTPVLVLAVPVTVPDVYARIGPAVEQTVRDRVRAGLLNAGETYPRTDFDFYQLGAPRACAAADLATAVAIARLTDFSLEYTYFGGIAFVAEVGLDGALRPVNGVAEAVDTAATLGFAIVVVAADNGAELAPTDQITVVGARTLAGVLAWLRGTTTLPTGPAPAMD

SEQ ID NO: 6104 - protein, 402 aa, synthetic construct
  REGION 1..402: note = TnsF-Tn7 System Protein
MPDSTLTLLDPLCWRCEQPVSTSEICTTVEGERLCPGCAACTVLTCDHCSGPATTLHRSGHDELLCVHCVAGMTRCRDCGTYYPEITATFRGDPVCESCVDLYDRCHDCGRLDDDSVYVQGGHHVCQRCRDECYRECPACDTVIHYDDDYCTDCTSPHDQIHRCSYRPTPRFHGTGPLFVGMELEINTPSRVLAQAADTALDHLGDLGYLKEDGSIDCGFELVTHPMSLDYALTRFPWPLLNRLRLLGCHTDSEVGIHVHLSRAGFDSPAHIYRWLKFVYRNENPVTRLARRRSTWAVFSEDARAMAFDAAHGERCCPRYQAINVRPTDTFEMRIFASSLKPQQVQAALGFAAGSVEYTRTLTAADITRRRGWEWSAFTTWLRTRPQYSPLLAELEDLACAS

SEQ ID NO: 6105 - protein, 322 aa, synthetic construct
  REGION 1..322: note = TnsF-Tn7 System Protein
MLTSPNFRTDLNEVVCASCAGVFFDLCGHCGRFSASTRYLSGGMRVCGRCAANYPSCGDCGGLVRSYDDCDHCERPHHVWNYSYKPDPHFHGTGPLFLGMELEVIVAHNYDESVRTACDELASLGYLKHDSSIRPRGFEIVTHPMSYRYAIEQFPWRLLGELDELGCVTDSSVGLHVHASRDGFDSPAHIYRWMKLLYRNESAVSTIARRRSHFAPFDRQARARVKETAKSHQYALGLDRYQAINPYPRKTLELRVFASSLQVQQVQAALAFTAASIDYTRGLDVAAVRAGAWEWSHFAAWVRTRADYAPLWAQMEELACAC

SEQ ID NO: 6106 - protein, 368 aa, synthetic construct
  REGION 1..368: note = TnsF-Tn7 System Protein
MVDRGREPWGSARLELVDGVALLRPEDVVLEAMLRGWQAQQVGGRGLRKATVTARLGVVKRFLAYTNEYPWHWSPAHLDEWMVDQISRAGLAKSTMRSYQDALNSFCDYLIRPEYHWVAECLERFGTHPVQICFEWNTRAHLANYEGNPDRRPMTREEVQQLFDYADDQVDVVLRRHRKGALSAYRDATLLKVIYAYGLRATEAAKLDEPDWYRNPKAPELGRYGNLEVRWGKSSRGSPPRRRTVHTVMPWIVEVIEDYVHNIRPRYGFPGSAAMWLTERGGRITPRHIEARFAEYRRALGLDETLVPHCLRHSYVTHQIEDGVDPRFVQEQVGHRFASTTAIYTGVSGDFMNTMMAVALAKAFETEA

SEQ ID NO: 6107 - protein, 110 aa, synthetic construct
  REGION 1..110: note = TnsF-Tn7 System Protein
MSAKLDYRWHLRELMARHQMFQTTQLRPKLAERGIELSDSQVYRLVVDKPERLSVKTLVALVDILGCSMEELIEPVAMAPRRRAVVGQAGEDGGVGEFRPKRARVVREQR

SEQ ID NO: 6108 - protein, 350 aa, synthetic construct
  REGION 1..350: note = TnsF-Tn7 System Protein
MSQLLRSLAHGELPIEHKTFESYDKYSKIKHLHQLLMKLGVLEYKDPNLQIFIRWLDRKMDSCDLNDEHIKVVRQYVRWHHLRRLRELSDRKILKEGHVGTSRQDTTVAINFLSWLEGKSLSLSQCRQAHVDEWFATGNTTRSRVRSFAKWAVRNRYIPQVDLPGRVTRRLPDIDQGKRLTLLADMLDNEGIPLNCRAAAILFLLYGQPATRLVHLTINDITTNDDVTEILLGDHPVPIPNPFDEIIRRYVRSRPNINTAGNADSPYLFVGTRPDQPITANYLMTLLRESGVELRAMKAATLRELVQEMPPTVAARALGFKTASLETHAAQAGMTWASYPALRRAERKNP

SEQ ID NO: 6109 - protein, 619 aa, synthetic construct
  REGION 1..619: note = TnsF-Tn7 System Protein
MDTLTAFIGPNGAGKSTVLRALDWFFNGEPKLTDDDVYSGADPKNRRISVEVTFNDLSDTDRGILGPKYAPPGSTSFTAWRTWLDGQDKMTGRAKSFPPFEEIRAATGVKGKKPLWEALLDKEPDIGLPKWPTLESAEQAMTRWEQDHPERLEDTESGVTHLFGFNGQHKLSGLFDYVLVTADLRAGEESVEGKKTIVGRILERAIDRDSANVAFAELAKEVSNLQAEITDTHLGSQLAELGAALTAEVTAFAAGRGVRLQVTTPDVRPSPASISVLISDALVETSVDRQGHGFQRALLISALKLLAARGAQGTDGSVICLAIEEPELFQHPAQARVFAKVLRDLSSDAEGGLQVVYATHSPYFIEPRYFDQVRRVSRRQGDPTAHPRVDIYQASLHAVVTRLAGYCSTDAIRQRWDQVCTRSLAEAFFAEAVVLVEGDNDKSILDGIASREGQRQFEVDGITVAQAHGKQHLYTPHAILAELGIPTLVVFDNDSGCGARVRTKMANGGRGKAEAEERNAANTNRALLRYFGEAEQDFPVGAIGKYVFVWDDMLETVLYREWASWEKTRVDLIDSGRGVDGKNSATYALAALSCPDEPAGMILDAVKAARALIAVNGSI

SEQ ID NO: 6110 - protein, 619 aa, synthetic construct; identical to SEQ ID NO: 6109
  REGION 1..619: note = TnsF-Tn7 System Protein

SEQ ID NO: 6111 - protein, 350 aa, synthetic construct; identical to SEQ ID NO: 6108
  REGION 1..350: note = TnsF-Tn7 System Protein

SEQ ID NO: 6112 - protein, 360 aa, synthetic construct
  REGION 1..360: note = TnsF-Tn7 System Protein
MALLRPEEQFFQAMLDGWRNQQLSRNLGFGTVNSREAIVRRFHAFAGVEPWEWSAADVDDFFTELRAIHGLAQSTILGYQLALRTFLVYLVDPAYGWSEACQERFGTHPTQVCHEWNTARHTQDAIAQPKKRALTWNEVQDLFDHADNRVERILSEGRKGAVAALRDAVLLKVAYAWGLRRNEVRMLDTIDFGFNPKAPAFGRYGVLYVRYGKAMKGAPPKRRSVLTVPEMDWAVESLVQWIDDVRPQVSGEDNPALWCTERSSRIALGSVSNKFNQFRKELGLASGVDFHSLRRSYVSHLIEYGYEARFVQEQVGHEHASTTSIYTDVSSDYRKRVVQNAFERIAGRAVRQGLAGKGGP

SEQ ID NO: 6113 - protein, 724 aa, synthetic construct
  REGION 1..724: note = TnsF-Tn7 System Protein
MTEFWGIHNDQPSIDPVADGAVRLGWDELGDLSALQPTREAFKEAVARAYSDKPGSVASWAGTLYRFVHTLDVGDIVVCPERATRTLNIGRVSGGYEFHPEADLYHHWRPVEWLATGVSRDELSVPAQNELSAAISLFAVNTGREELERLIADPPSADEQADFAWVPFYQELADAVLTFRHNREGLLDRLWQVAATPGVERYFQYLRTDQRNDGSRGPLGDVDPFTIFGPFNRGITNAARARIAEAYRTVFEITAAAPTSFAGIPVVNNLNSWFIRWENERSANEVDSLWDLAEAAVAYAASGTEETRESLVAAFDAATRGNTRKLSMGLYWIRPETFTSYDQVNVRFLADMYPELAETLALRSKIDGEQFLANTEHVRAWIDEENTLFASIPELSAAAWRYANAERDPASEPTDAPSSPVPESVPLEGDIYTLDSILEDACFIPRPELDAIQERLLTKKNLILQGPPGTGKTWLARRLAWAICNERGSDRVTVVQFHPSLAYEDFVRGWRPTHEGKLDLVDGPFLTLCDQAREHPDHRYVLVVEEINRGNPAQIFGELLTLLEADKRSPDNAMRLTYPKDDGERFHIPPNLYVIGTMNVADRSLALVDMALRRRFAFVELEPQFGSTWTEHVSGLGYDLETLESFGHRMQTLNKQISEDRALGRQFRIGHSFFTPPTPHGATDLTTRQWLERVVQTEIKPLLEEYWFDRPDTVDDRLAMLLES

SEQ ID NO: 6114 - protein, 724 aa, synthetic construct; identical to SEQ ID NO: 6113
  REGION 1..724: note = TnsF-Tn7 System Protein

SEQ ID NO: 6115 - protein, 393 aa, synthetic construct
  REGION 1..393: note = TnsF-Tn7 System Protein
MHRQRPRPRPPQPRRRHYRPQLLPLAEALTTVEKAWSVRHWLRVSTGARILAQLAARPDEITHEVLDSLPQDAVTRYVREVLVATGVLPRRQEHFAQLELWLDGLLDRLSPHQARVIRPFAEWHVLRDARRRADRGRYTASSAAGDRTDIRVAVEFLTWLDARKLVLATVAQEDLDLWLTTHPTRHSGVASFIRWTVARRLTSKLVVPPKNKGLPANFLSEYDYDEQLRRRLTDDTLPVEVRIVGALVRLYALPVTCIVELTTDRFHREEDGAYFTFDRNPVLLPPKLARLIEQQIAQPGPTSVLRRPSEVGFLLPGRPPSKPRSASEVHALMKQYDLPVLAARNTAMLEAVSELPPIVVSDLFGVSASNAHAWAGFAQDSWADHLAACQETE

SEQ ID NO: 6116 - protein, 479 aa, synthetic construct
  REGION 1..479: note = TnsF-Tn7 System Protein
MATHAPGSAPLVLARNVIHLDPAPAVFEAMREGWARQQSARFLKPSTIDPRVRLIERLEEFTGLYPWQWTPADGEAFIAHLRSGDKPIQMSTARTYEVTIGLFLEYLLDARYGWVHACSERFGEVPQQVFHEGNSVLHTVEYEGDPRRRPLDYDEIQALFDAADALPGKIRGQGRKGALCALRDAAVLKTIYAYGTRRTEPSRLDLVDMRRSRRAPQFGRFGSAMVRFGKSQKGSPPKRRTVLLIPEMDWVVDVLDQYVTEIRPQFSPGRHPALWMTERVGRLSPRSINDAFVAAREGRWPRRGSRPPLSPPQLDHARDRVRLSGPVRTGKCRSFARSHHGYLHGGLERVPQQAAGSFDEEPTGRRLGRDLVIKKMGYQWQLRQLMAERQMFQTSDLVPLLAERGVTLSREQVYRLVTQPPQRMSMDTLVALCDILQCTPNDLIKPEVVNTQVRKVAGGDADPTPITPRRAVIRRPGQP

SEQ ID NO: 6117 - protein, 623 aa, synthetic construct
  REGION 1..623: note = TnsF-Tn7 System Protein
MSTAAADAARQRVLTLLTTQLPDLDAQAADQALVTANAAGQALWDIDRHLAVHPDALVSGSPDVPPSVFRLVVVLEAAGHPVRVPHCAGCGQRKPLPQRIPAGRVCVSCRSKAVPPHPCTRCGQRKQVVAQWPMGPVCRRCYREVRGRPAPCGGCGAIKPLIGVDGRGRGVCGACAGGRFDYVCRRCGGGEERYQDGNCVRCVAIERLHEQFRGPTGQVLDVLVPLLAALAQADRPRSVLEWLRRDDGGAQVLRQLGAAGVEPTHEVLDSLPPTGVNALRQMLVHVGALPARIEYLERVPAWLNRQLALLPEQHRQVIHVYVTWSVLRRARQRAAHARFTEASAHNLRGRVRAALAFLRWLDERHVALADVTQALIDQWLSEGACTRRVVKDFLDWAAGRGLAPELDIRYLPPSEPDLSVTNEERWEQLRRCLHDATLPLEVRAAGGLVLLYGLPVSRISELTAEHLISTETGHVLQLGGHRTALPPPLAALLTDLARTAVTTSTVGRSVPGPRWLFPGGLPGQHFTPGRLANMLNRHGIRVRVGRNSALAALAADIPAAALSPLLGISIEAAVRWTHRAKRDWQAYIQARATAPAAPDRDSNGAMDAPATEQGASRSGRVRP

SEQ ID NO: 6118 - protein, 623 aa, synthetic construct; identical to SEQ ID NO: 6117
  REGION 1..623: note = TnsF-Tn7 System Protein

SEQ ID NO: 6119 - protein, 371 aa, synthetic construct
  REGION 1..371: note = TnsF-Tn7 System Protein
MDEVLDTPGSARLVLAEGVSYLDPAPAVFEAMLQGWARQQRVRFLKAETIQRRQDLVRRVVRFSGQYPWEWTAAELEAFIDSRRSAAQIVVSTARGYLGGLQMFLGYLTDPRYGWPEACRERFGRAPVQLLGEWNTIAHVSAYEGGPGRRPLSYDEVQALFDAADGLVDEIRARGRKGGLAAQRDAAVLKTVYAFGLRRQEAWGLDLADLRRNPKVPGFGQMGALLVRWGKSSRGSPPKRRTVLLVPEMDWVVPLLEQWLHEVRPRFGPGGHPALFTTERRGRMSMRGINDAFVAARDAAGLDGVLDLHCLRHSYVTHLIEFDYPERFVQDQVGHAYASTTALYTGVSDDYRNRLLTQALQAQEQQWEEQR

SEQ ID NO: 6120 - protein, 112 aa, synthetic construct
  REGION 1..112: note = TnsF-Tn7 System Protein
MIRKMGIEWHLRLRMAERGLFATSELLPLLAERGIHLSREQVYRLVTQPPQRLSMDTLAALCDILGCSPNDLIEVQAVNKQVRKASGDAGRPAPPPVRRTTIRRPGSGGEPR

SEQ ID NO: 6121 - protein, 341 aa, synthetic construct
  REGION 1..341: note = TnsF-Tn7 System Protein
MDALPRTGWADFLRDFLVVVGVLPERQLHLARLAPWLDSLLADRPAEQARIVRTYATWQVLRRLHASSATAPVSYARAHRARSCISRAADLLAWLEQRGQDLPTLRQADLDQWLREAPGGRNYVAPFLTWARSRRLTGDVTVHRPPESEPTAGIDHDDRWALVNELLHTQHAAIELRVAGLFVLLFAQPLSRISTLTVGDVHLGDRRVEVRFGTDMIVLPDPLADLVRDLVGRRGHSSYPDQQRTWLFPGGAPGRPLTDLALGRRLRDLGMPRIRSARNSALMHLAAQLPSPILASLLGLLGLLGLHPSRAAAWGNLAKRDWAAYTAHRAHRPDRRDSTDS

SEQ ID NO: 6122 - protein, 341 aa, synthetic construct; identical to SEQ ID NO: 6121
  REGION 1..341: note = TnsF-Tn7 System Protein

SEQ ID NO: 6123 - protein, 370 aa, synthetic construct
  REGION 1..370: note = TnsF-Tn7 System Protein
MRRLDMPGAAHLVLAEGVIHLDEAAAVFEAMLEGWARQQQSRFLQPTMINPRLSLLRRFRDFSGDYPWSWGPGDVEDFTVALCAKQRAHSTIRGYQMDVGLFCDYLVDARYGWQATCLERFGQAPVQICHEYNTVAHLNEYEGRPERRPMTHEELQAFFDHADARVQRIVDRGRKGAMAALRDAMLFKVKYAWGLRRRELVRLDLPDLRPNPHVQEWGRYGSLHVRYGKAVRGSPPRRRTVLSVPEFDWAIEGLTQWVEEARPRMRGAGHPALWLTERASRVSVDYVDTRFAELRDELGLDKALVPHCLRHSYITHLIEFGYPEQFVREQVGHRSASATAIYTSVSNDFKNQILARALARVYAPQGGGPR

SEQ ID NO: 6124 - protein, 116 aa, synthetic construct
  REGION 1..116: note = TnsF-Tn7 System Protein
MTRKMTFHWHLRQLMAARGMFQTSELVPRLAERGVHLSREQVYRLVTQPPQRLNMEVFVALCDILTCTPNDLIEPFELPQSQRQDAAVGDQHAGSTGVGELRPVRARIVKPPEESN

SEQ ID NO: 6125 - protein, 494 aa, synthetic construct
  REGION 1..494: note = TnsF-Tn7 System Protein
MARPKPAPDPSKHSPCDRCSQAYPPAARWQDQRICQYCYLAAKRTTGQCARCGHVGICPGRTDRGEYLCRGCSGIQLNVDCVRCGQEAELYRHGHCWRCELGFQVDQLLSDPLTGTINSQLEPLTAALKTMTRPNSGVTWLRNPQVRAILQELARSRSIDPSMLDGLPHTRVALHIRALLAEYGLTGARVGYRRRYELWADEKIATVVNPRSQLVLRAYIRWHLAHKLGEGCTEGRFLASKQVVTVAAEFLNWLDAQDISLENLMQPDVDRFLAEGTETRRRLDRFLPWAIKTYKLSALEIAPHRRDTTREKTHDEQVEQLRAAFSEPGLTVQDRLMAALILVFGQPTHKVVALQWTDIRADPGEPMMITLGKHPIALEHPLDDLVNDVRISLVNRQTAANRNSAWVFPGYTAGVHLTAGYARVRLKELGFPSRATRIGTWRSITQTAPPPVLADALGLSAQRAIRHAQLGSAQYGAYISDILTLDLDFGDPSS

SEQ ID NO: 6126 - protein, 494 aa, synthetic construct; identical to SEQ ID NO: 6125
  REGION 1..494: note = TnsF-Tn7 System Protein

SEQ ID NO: 6127 - protein, 353 aa, synthetic construct
  REGION 1..353: note = TnsF-Tn7 System Protein
MLECWRAALLARNMAPSTINQYLRVLTDFQMVCGEYPWRWSPFDVGDYVTVVHGRAFDRRGQMAAKSTVRGYLVVIRGFCSFLCDSRYGWPELCNKVFGEYPSQVCFEHNLPVHVSASEAEPQRRAFSREELQRLFDFLDSRVDELYRAKNKAWLTTLRDAAIAKMGYAYGLRRRELLRLQIHDFGPNPHVQSYGSYGAVYVRWGKASQGSAPKRRTVLTVPLMDWAPQILEAWINDPDCRQQMRYAQDSAWLWPSERGPQLSLDSYATRFSFYRRAAGLPEGLSLHGLRRSYVTHLIEAGYDPLFVQQQVGHEQSSTTALYTQVSSDYRQKTLQRMISSRLQSARIGYGGAP

SEQ ID NO: 6128 - protein, 500 aa, synthetic construct
  REGION 1..500: note = TnsF-Tn7 System Protein
MSPPRKPRARSTAPDPKRWPECSRCGHCYQLAARWPEGPICMHCYNAARRREGACADCGHVGMVPGLNTAAEPVCLRCSGIPLALTCTACGEEAWLAKGATCWRCLLRGMVHDHLAGPDGQISPALQPMAEALCSMPRANSGVTWMRANPQVGQLLRALGTGSLELSHDALDALPAGRTVEYLRALLVTHHALPPRDRRLATFQRWLDDTLARVEHPEHKQLLDRFARWHHLRDLRRQAEHGPVEAGPVLRAKQSITVTIEFLGWLDRRGTTLAALSQHEIDSWHAGGPGTREHVQRFLYWCRAQRLTGKLELPRRDKDNPQLIGEHARLKIIRSLLLGDELALPYRIAGCLITLFGQPAGKVVALTLADLTGSDASSPELRLRLGKQWVPVPEQLAALIHLHLEHRANTNTAANAQSRWLFPGQVPGEHLSRTTLLAALRGNGIPVRAARNTTWQQLVREAPPQVLADALNISPATAMKHAQRAGSDWARYVSTTHHQQ

SEQ ID NO: 6129 - protein, 500 aa, synthetic construct; identical to SEQ ID NO: 6128
  REGION 1..500: note = TnsF-Tn7 System Protein

SEQ ID NO: 6130 - protein, 369 aa, synthetic construct
  REGION 1..369: note = TnsF-Tn7 System Protein
MFEAMLAGWRDQQLSRNLRVDTVDGRLMVIRRFQRFANEFPWDWRPVELEAFTAELRGDGCALSTVRGYQGAIRLFCDYVADPRYQWTAVCERLFDTHPAQICFEWNTAVHVQDNESDPRRRALTKQELQRLFDYADEQVERARRSGHKGWFTAVRDAAALKTTYAWGLRRREAAMLELADFGTNPHASEFGPHGVLYVRWGKAGKGSVPKRRSVLTVFPWSVRVITQWVEQCRELTPTAARSSSLWPSERSGRLSKEKLSARFAAYRDAIGLPPELTLHCLRHSYVTHLLEAGYGPLFVQHQVGHSYASTTALYTSVSSDFRTRTLRGVLDASVGRALALTADGIDQHPVADEHGRRHGAGATTMGDL

SEQ ID NO: 6131 - protein, 119 aa, synthetic construct
  REGION 1..119: note = TnsF-Tn7 System Protein
MARRRLDFHWNLRQLMAAHQMWKTTQLSPLLAERGVKLSPAQIYRLVTDKPERLSMKTLVALCDIFDCSPNDLITPHVVAATVPKAASSASGPDVVRMPETFRPERARILDENDDDEDR

SEQ ID NO: 6132 - protein, 421 aa, synthetic construct
  REGION 1..421: note = TnsF-Tn7 System Protein
MCADCAGQPAQYVCRTCGSEQHLVGRRCARCIVSEQVTALITTPDGDIHPQLRPVLDALLARNNPQSVQRWLTRGKATQILASMARGETPISHEGIDAFPRDRAREYLRDLLIACGVLPETSRALRDTLEWVDGFLAEHSSPDRHVLLAYTHWHIVRRARAQAAKGKFTESAGGNIRAHLRALGRFLDWLHAQHTTLDRARQAHIDEYVAAHPNATRHLPQFLSWTCATNRSGPVTSPTYRSQLPTPQTADAGHWQTVERLLQDESIRVDTRLCGLFVLLYGQRPSHISRVTRDRVTLTRENVSIRFADDPIVLPPEVDTLLRQHLRSVDSDGERADSPWLFPGVNPARPIDQGGLGMRLKRIGVAAQTSRTTAIMQLAAELPVAVLAGFLGIHPQTAVVWNKLAASSWNSYPALRRSQSP

SEQ ID NO: 6133 - protein, 421 aa, synthetic construct; identical to SEQ ID NO: 6132
  REGION 1..421: note = TnsF-Tn7 System Protein

SEQ ID NO: 6134 - protein, 369 aa, synthetic construct
  REGION 1..369: note = TnsF-Tn7 System Protein
MDAVPGAASLLLVSGVKYLNEASAVFEAMVEGWSRQQASRRLKDTTIHPRLTLIRRFQEFTNEYPWNWKAQDVEDFTVSLMSGDRGLSTGTIRGYHLMLRQFCDYLTDRRYDWMTECEQRFGAVPVQICHEWNTVAHLNEYEGRPERRPLTYDELETLFNYCDERVEQIVRAGRKGALAAMRDAQMLKTTYAFGLRRREVVSLDIADLRVNPQVREWGKYGSLHVRYGKAVRGGPPRRRTVLAVPEFDWALDGLRQWVEQARPKMEPGAHPALWVTERNSRVSVRYLDIRFAELRAGAGLPAELTLHCLRHSYVTHLIEFGYAERFVQEQVGHATASSTAIYASVSSDFKNRILTEALHRVYQPEKGSS

SEQ ID NO: 6135 - protein, 576 aa, synthetic construct
  REGION 1..576: note = TnsF-Tn7 System Protein
MTRVIKFMAWMWLQAWRAAPLQTVAVAAINLLLSAIPALQVLAISAYISALTTATKFSDTTSSFLALVLLIAFTAPLTNIELTLQTRAVDLIKLRLASEMTSTIAGLTPQELSTPEIAAQIEKANSAAQDELPSRFGFMVILLRDTIAVIAVIISLASMSILAAVLVCLSLLPAFYAAHRANGINIRLWDSIGHLYWRARYLHQLLVSGSTSRELNSLGAASKIGGLVSDVYTSITDKRKETYRPLLLARLLGGVISSIILAVALIALTSGVNYGPVAAGGVYGVMAAMGTVGGLGTNLGAMIESVAPYSRYTDLQKLRRPAIPHTHKPRVTQLSVSDLEFTYPNGTRPSLTDFSLEVRKGQIIAVVGVNGAGKTTAINCILGSLQPDRGEVVVDGASQSAMTAADWGSHFGILTQEFGKYELTVRQILTLGAVEPAPCDDQLWAALKAADAETLVRSFPDGLDQQLGTQWSGGVGISGGQWQRLSLARIVLRDAPIWILDEPTSSIDAESEQEIFKALQRDRADRITIVVSHRAWTLKGMDEIIVLDKGRIVERGTYSDLLTREGRFAAIFAEQV

SEQ ID NO: 6136 - protein, 576 aa, synthetic construct; identical to SEQ ID NO: 6135
  REGION 1..576: note = TnsF-Tn7 System Protein

SEQ ID NO: 6137 - protein, 110 aa, synthetic construct
  REGION 1..110: note = TnsF-Tn7 System Protein
MIKKMSARWKLRELMALQGLFQTTDLVPLLAERGIHLSREQVFRLVTKAPQRLNMDVLVALCDILTCTPNDLIEAVEEPTTVEKTGTDGEVRGIGDLRPVPARIRRPDQA

SEQ ID NO: 6138 - protein, 365 aa, synthetic construct
  REGION 1..365: note = TnsF-Tn7 System Protein
MNPGSVHTWVREKRSLAWLAELARSGRDITHEEIDRLPQNAQTLHIRAAFVAAGVLPQRNEALAQLQLWVDRTIPTIAVEYQSVIRAYAEWHIVRRARQRAARGPFRPGADSSNRQRIRCAVTFLAWLTEVGASVADLRQHHVDTYFAAGAPNPKALSTFLAWMQARHLINGIEIPRKKDGLPFRFQDQDDQTDQLRRCLTATEIPLEVRIIGALVRLYAIPVARIVELTTDRFSRDDTDAYLVIEQNSVVLPPSLAALIEELIAHRHSTGRPDSGPGIPAYLFPGRPPSRPRNTKALSRTLNRYGLPTLTARNSAMIANILDLEPIVVSDLFGVAPQTAHKWAQYAQSSWATYLAARPVERQRT

SEQ ID NO: 6139 - protein, 365 aa, synthetic construct; identical to SEQ ID NO: 6138
  REGION 1..365: note = TnsF-Tn7 System Protein

SEQ ID NO: 6140 - protein, 392 aa, synthetic construct
  REGION 1..392: note = TnsF-Tn7 System Protein
MLRIGLTGGIGAGKSTVSAAFAECGGIIVDGDVIAREVVEPGTEGLAALVDAFGHDILLPSGALNRPALAAKAFVDDEQRAKLNGIVHPLVARRREEIIAAVSEDAVVVEDIPLLVETGMAPMFPLVVVVHADEETRVERLIKRGMDEADARARIKAQAPEEQRVAIADVLLDNSGTPGELVERAREVWYQRVLPLAHNIRTRQMVRTPPKVVPYNPAWPDDARRIISRLKMACGPKALRVDHIGSTAVPGMAAKDVIDIQVTVESLAVADELADSLTAVGYPRVDDITRDRVHSDDPSVWRKRFHGAADPGRPAHVHLRVNGWPNQQFALFFVDWLKANPAVREDYLAVKRTALTAADYVEAKEPWFLDAYWRAKAWADATGWQPSEPDSG

SEQ ID NO: 6141 - protein, 392 aa, synthetic construct; identical to SEQ ID NO: 6140
  REGION 1..392: note = TnsF-Tn7 System Protein

SEQ ID NO: 6142 - protein, 321 aa, synthetic construct
  REGION 1..321: note = TnsF-Tn7 System Protein
MSHRNARTTFHGRLLIVRRYQAGWPKAHIAKAMGVSRKCVHTWISRFETEGEDGLHDRSSRPHTSPTRVRPSVENQIVAWRKRHRCGPDEIAAKLGICPRTVSRVLNRRQMPHLRELDPMTGQVIRASKTTAVRYERSRPGELVHMDVKKLGRIPAGGGWRAHGRGRAPDRDRKNGHGFDYIHSLVDDYSRLAYSEILPDEKGATCAGFLRRAAHHFRAHGITTIEEVMTDNAWAYRYSIRDVCAELGARQLFIKPHCPWQNGKVERLNRTLQTEWAYKRVFTSNAQRAQALAPWLHYYNTQRRHSALGGLPPISRLTPTS

SEQ ID NO: 6143 - protein, 342 aa, synthetic construct
  REGION 1..342: note = TnsF-Tn7 System Protein
MLEGWRRQQSARFLRPSTMLMRLRLINRLVDFTGLYPWQWTPADGEAFIDHLRNLDEPRALSTVRGYEVAINLFLEFLLDPRYGWASACEERFGEVPQLIFHDGNSIVHRSDYEGDPRRRPLTYDEIQALFDAADARPSKIVRRGVKGGLGAARDATVLKLIYAFGLRRTEASKLDLVDLRANPQMPQFGRFGSLMVRFGKSSKGAAPKRRCVLLVPEMDWIIEVLDQWLTELRPRFSPGPHPALWITERVGRLQPRSINDAFVAAKRDAGLDEHLDVHCLRHSAVTHWTEFGYPARFSQEQVGHSHASTTAIYTGVSNEFRNQMLVASLKGRLGKNWDVIR

SEQ ID NO: 6144 - protein, 108 aa, synthetic construct
  REGION 1..108: note = TnsF-Tn7 System Protein
MIKKMGYRWRLRDLMADQQMFQTSNLVPLLAERGVTLSREQVYRLVTQPPQRLSMDVLVALCDILGCTPNDLIEPEVVNVQVRKTAGGKSGSDPIQPRRTVIRRPGRQ

SEQ ID NO: 6145 - protein, 271 aa, synthetic construct
  REGION 1..271: note = TnsF-Tn7 System Protein
MWMHARSLGNPRLLGNIRDHQPFFERIDAEYSSALDLNGPALLQLFGTGVLRRHLLPVQFLTEELDIHLRSEDKSDASEAARITELLIAAKRQPWNELLQAYHQALMKSALSPRSVRTYLSNAALFCASANVGNEAWPAGRLEHYLEAKPGARNSLSRFITFCRSARGWKVQMPPKGVVVRPLADPVRSARKLRDLISNVEETGIASASQDVLGSILAESLGFPKAVVLSSTATDFQVTLDAVTYFYGKERICIPQELDPYARRFVEMLVK

SEQ ID NO: 6146 - protein, 388 aa, synthetic construct
  REGION 1..388: note = TnsF-Tn7 System Protein
MKEIEVVDDFEADFANLARLAAAGSIEDMRLYLAKLVRKYRAGRPQFSSKLDQLLKTSQIRASGPSVMRRAPATSEAVTLLPQDQDSRQSLVRVFDDRDGLAAPILPAALAKQIDDIVSERKERAKLAAHGIRPTRSAILVGPPGVGKTLSARYIATQINKPLWVLDLTTVMSSLLGKTGNNLRLVFESAKQNEAVLLLDEVDSIAKRRSDDSDVGELKRLVTAILQEVDNWPDSGLLLAATNHPELIDPALWRRFDAILRFDVSDREGVALAIGRFLDRDAQQFGPWINLMASSLMGQSLSDVERAILTMRRNALIHQIPPARLAVDLAIRHAGELDKNARRDLAISLAKEGAMSHNQISELTGVARDTLRKYAGPSPLKGRGHKKE

SEQ ID NO: 6147 - protein, 388 aa, synthetic construct; identical to SEQ ID NO: 6146
  REGION 1..388: note = TnsF-Tn7 System Protein

SEQ ID NO: 6148 - protein, 460 aa, synthetic construct
  REGION 1..460: note = TnsF-Tn7 System Protein
MNRKVLCIVSDDTQAQLLRQALIAWDVRSVSNFDDAQRELSDERYIVGLFVHDRRLGMSADIKTFLITNHTVEWVGVYAEAHLNKDGSQELISEHLYDYHTLPIDPVRLTYTLGHAYGRAQLYRALPQATAGRGMSAILGHSAAITRLRDHIGRAARVTAPVLIWGESGTGKELAAQAIHLKSSRVGQPFVPINCGAIAPSLIQSELFGYERGAFTGATRDKVGLIESANGGTLFLDEIGDLPNELQANLLRFLQEKTITRLGSTCAVPVDVRVIAASHVKLEQAVAKGMFRQDLYYRLSVLPLTVPALRERGDDLTLLAEHFFVTYASDKAFRLKGYSEAALKAIAEHDWPGNVRELINRVRRALVMAEGRLIRPEDLGFLSPAALTHEAELDETRLRAEQQALRECLERSSRNVSLAARRLGVSRTTMYRLLSKHNLHAAGRERPKLRQSAADEEANY

SEQ ID NO: 6149 - protein, 460 aa, synthetic construct; identical to SEQ ID NO: 6148
  REGION 1..460: note = TnsF-Tn7 System Protein

SEQ ID NO: 6150 - protein, 639 aa, synthetic construct
  REGION 1..639: note = TnsF-Tn7 System Protein
MFSNPAKFTFPVDDALWAVKHIDQFTQAHARTRTAAVKVMLQRLPLKSTSQLTRLSVAAAKELLGKRDTDAKPVFDFVSILVGALPGICIGDVFRNGEKVGELPSVKRTLTLDAGETDSTQAKAGGTIAPLPGWGTMPCRVLNASEYSGIADHPLQNVRFSQSRFAYFRRTRKDGGTDTFVLPRMTIFKAFYASHSVLANAFCAGPWEHEVHRAISFTRTHGGAQTGVVNNGEQWDIVLQTLIQDEYAGILAVLHFDDYGRSRAKSIYSQALQERNHNPRAPWYANAEIPLRSIDESLHLSLKCLQLRSWRDRKSGGPEHHKFLVTDIYGSSWPSHYPIIAHTRTNAGEGSPRPQPVPLPAPFRGTPPSKEANEDTVIRSDLDAHTGSSTTIIKGREWCWLDTGPKYRKLEKEQSGRYEGGGFAGIDNDTAHVSPGAHTSENDALPKAEIKSVVRIPNARFDHMHQALAKLVETNVITQLTPIPANRSGQRAQRSGYECWTFIDDESLRRKLGPAGGFRTIYDIPRVRRSAHWRTALVLSFQYRRQIHHWIEIECNRSNAFRSLLLTIASGRDVHDTIEVTLNAIAEAKGIGLEKAVRAIFPDAPIKVFAYTHRYQKDGTLRVDLLKAFLERNVADPAG

SEQ ID NO: 6151 - protein, 229 aa, synthetic construct
  REGION 1..229: note = TnsF-Tn7 System Protein
MKNSEITRLDLMLPVRSIGTNRRSLTGRVVLGSGNAAGFESSLERDWLICLDFDPDVELILEQPFSLNYEIDGSALRYTPDVLAQYRERNGTIPVVVFEVKPYEELRAEFAKYRQRFKRMVRHCRERSWRFKIVTERDIRTPYLSNAKFLRKYRKLTAQTLYKEQLLYSMKALGPTTAQGLLAMAYLHEEKRMAALTELWRMVANREIKAELDKPLTMHSTIWLGGEHA

SEQ ID NO: 6152 - protein, 635 aa, synthetic construct
  REGION 1..635: note = TnsF-Tn7 System Protein
MPNVLPKAFFSAEPGQIVRSANRVYRITHLVSIDSVFAVDVQTDESVRLRIDTLTPVDKEEASVDQVAGKDRDLLLYSEKDWQEAQRRFQAIKLLLDNPLRTRADADLVAQQFDVHTATLYKWLKLYQEAGHVSALVPTKRGRRTGTKMLQGEQEKLIATVIDDEFLTKQRMRPQDVIDEVMRRARLSKIDAPHPNTIRQRIKMLPVAETLRRRGHREIARNKYDPIRGEFPGADFPLAVVQIDHTPADIILVDDVHRQPIGRPWLTFAIDVYSRMIVGMHITFEKPSSTSVAMCISHAICPKREYLAELGVSGEWPVWGTMSAIHSDNAKEFRGIVLERACKEYGIDLQWRPVLRPHYGGHIERYMGTMANQIRKWPGATFSNPGQRKGYDSEGESALTLREFEYLVVEFIVNVYHQRNHSELGMAPRKKWELGILGDATKPGVGIPPVPGDAARLRLDFMPFYERSVQQYGIQIECINYYDPVLDPYINSTDPENSRMRRSFLVRRDPRDISKVYFFDPVAKSYYPIPYRDMGHPAMSAWELKEVQRKLKEQGRSNIDEHAIFDALGRMRNVVEQSVQRTKAARRQATRTPAKVVVKEKPLIIADLRVQPASTIEDDPFAQPIEPFDDVAVSR

SEQ ID NO: 6153 - protein, 243 aa, synthetic construct
  REGION 1..243: note = TnsF-Tn7 System Protein
MADTPALALTGLSKHFGRPAVDGLDLTVRRGEFYALLGPNGAGKTTTLRMVAGLLAPDAGRIEVLGIDLALEPIAAKRKIAYLPDDPMLYGKLKPYEYLEFVAGLWGVESQAAEPRARELLAWLDLDKHAHELTEGFSRGMKQKLALAGALIHAPELLILDEPLTGLDAGAARQVKDLLLSHVQQGGTVILTTHILEVAERLAGRIGIIQHGRLIAEGTLDELRAATPGATLEDLFLRLTGPA

SEQ ID NO: 6154 - protein, 243 aa, synthetic construct; identical to SEQ ID NO: 6153
  REGION 1..243: note = TnsF-Tn7 System Protein

SEQ ID NO: 6155 - protein, 296 aa, synthetic construct
  REGION 1..296: note = TnsF-Tn7 System Protein
MIEVQTHLNSDVLPLLQLPNDERIEHCKSDHWIGYTRATQIMQQLDQLLVYPKTLRMPNLLIVGRSGNGKSSILERFSHRYPVQITATGSPIAPVLRISMPETPDESEFWSEILWSMGISHGDRDSAAAKKRQAKSILSYAGIRVLVIDEFNNLTTAGKKAGDLLAAIKGLSNDLKISIIAAGTQAAINALNLEPQMKSRFEPAALDRWSLNTEYLRFLASYERLLPLAEPSNLASRELAPKLYSMAGETLGSTVKLLKEAASFAISSGREKIDEQVLRSMKWTRQDEWEDIAKRV

SEQ ID NO: 6156 - protein, 296 aa, synthetic construct; identical to SEQ ID NO: 6155
  REGION 1..296: note = TnsF-Tn7 System Protein

SEQ ID NO: 6157 - protein, 577 aa, synthetic construct
  REGION 1..577: note = TnsF-Tn7 System Protein
MNLQPRPCTQCGEKVAEYGRRRCFSCLHPSLPPPVCKTCGSDDHYAGGYCRRCHPRVVSADSCSDCFAWGIWRRRGLCAACNSFRNRGHQPGRCQTCGRTVPLKKGVCRLCHCQARAIPRTWQRPDLTTAATTGQQLFLADQIRRVHLAARRPRSRTSPATVRHHPRALCWTVPRWRQDRLFEAARDMSRVTVPDVAPLDPAFTDYVAAQADNHADAQGWSPGLRERVQQSLYLLTAVHGPHETIKASTVATLPRQQSRRAVLRVTEVLATLELLNDDRPDPLDQWIHRRLSRVHPEIGEEALVWINIVRHGGPRRRPRSPATVRNQLTSAIPFLLACSERYCTLRQVTHGDLTEWLAQCPAPHNEAVALRSMFKTLKSQRLLFTNPARGVSLGARPGTVPKPLSPEAIQFMAEAAATDPALKLLIALIGIHALYPHQARALPVSAIDFVRGRLAHGDIDHPLETFTRQAAADYIELRRERWPNTRNPHLFISSQTAYSRAAVTIGWMQVVLHGLPVTAQRLREDRILEEAAVTGADPQHLCVMFNITPETGLRYIRFFQPNPADSDDASPSHLETS

SEQ ID NO: 6158 - protein, 353 aa, synthetic construct; identical to SEQ ID NO: 2196
  REGION 1..353: note = TnsF-Tn7 System Protein

SEQ ID NO: 6159 - protein, 437 aa, synthetic construct; identical to SEQ ID NO: 2197
  REGION 1..437: note = TnsF-Tn7 System Protein

SEQ ID NO: 6160 - protein, 106 aa, synthetic construct; identical to SEQ ID NO: 2198
  REGION 1..106: note = TnsF-Tn7 System Protein

SEQ ID NO: 6161 - protein, 270 aa, synthetic construct; identical to SEQ ID NO: 2199
  REGION 1..270: note = TnsF-Tn7 System Protein

SEQ ID NO: 6162 - protein, 270 aa, synthetic construct; identical to SEQ ID NO: 2199
  REGION 1..270: note = TnsF-Tn7 System Protein

SEQ ID NO: 6163 - protein, 229 aa, synthetic construct; identical to SEQ ID NO: 2201
  REGION 1..229: note = TnsF-Tn7 System Protein

SEQ ID NO: 6164 - protein, 375 aa, synthetic construct; identical to SEQ ID NO: 2202
  REGION 1..375: note = TnsF-Tn7 System Protein

SEQ ID NO: 6165 - protein, 846 aa, synthetic construct
  REGION 1..846: note = TnsF-Tn7 System Protein
MTLPKDSAISRCDADPVAVIADIVLAAELAIERTKVESLVRDVVARRHQQRELARALTAAPDLLTSARPEGPMSVQRLIQALLNHDAQRVVLPRCARCDNARLLSLLDGEKRICEPCFTRAKVGRQPCANCGLSRSVIYRDHLDRPWCWSCRPSPQKQGSAEEAIRAIVEIVSGIEPDLARETVAEAVRESIPQLPQLHRTAGALRDTPDLLTGRGAHGSPRILALIDALLARGATSVVAPPCPNCGNVTKLGTVLNGLRCCRRCYEASRKKPCSGCGHVREVSSRTAEGLPLCSACSARQPFQYGECSACGQHKKITTRAKGTPLCQACSLPVVTCSLCKKAKPCYFADTEAPRCPGCTRKLAAEACSRCGRVRTVRTRSADGSAICNPCGTLRETCRDCGNIRNVATRTPDGDPLCGRCYEKTPFAFRDCTECGSHGRLFHHGLCNSCARTAMVQDLLADTDGVVPTRLAGLSAALLGGDPLATLNWIMRPSSLAMIATLADSRAPLTHEALDGLQPLLAVRHLRATLVAHGALPERDEQLANLERWLAKTLTKINNPEDRRLVRSFATWHHLRRLRRQSATAPLTYAQTTQVRREISTTISLLAWLAERDNTLGTCTQGHIDEWLDSDRAARPFGRNFILWAAKNRHCGPLKVPAHSPKPAATFIDQDDRWQLIRRLLHDDGIDLPDRVAGLLVLLFAQPLTHIVRITPNEITVSDAKVTLTLGSKPLELPPPVDELMLRLRDLPDLNPRSADDTRQWLFPGGLPGTPLGAPQLMRRLRVLGIQARPTRNTTLREFASELPSVVLSKLLGVHINTATRWSRTTSANHAEYAADLSRRKAFRKS

SEQ ID NO: 6166 - protein, 846 aa, synthetic construct; identical to SEQ ID NO: 6165
  REGION 1..846: note = TnsF-Tn7 System Protein

SEQ ID NO: 6167 - protein, 364 aa, synthetic construct
  REGION 1..364: note = TnsF-Tn7 System Protein
MEVGPGSARLELVDGVALLHPEDAVLDAMLLGWARQQRGGRRLEPGTVEDRERTVRRFMKFTSEYPWRWTAGHMDEWTTYLIAELGRANSTIRNYQGSIRMFCDYITSPYYEWPEQCETRFGTHPVQICHEWNTAAHLLDYEGDAERRPMTREEIQTFLDYADDRVEFAVRRRRKGAQAAYRDATVFKVIYGWGLRCTETSKLDITDFYRNPKAPELGRFGSMSVRWGKGSKGSGPKRRTVLSVMPWAVEALEDYMVNLRPRYQASGRPALWLTERGGRLQAREIEDRFATYRDALKMDESLTPHCLRHSYVTHLIEDGADPQFVQQQVGHDYASTTAIYTGVSGDFMNTMMRKVLDRSMTAEG

SEQ ID NO: 6168 - protein, 110 aa, synthetic construct
  REGION 1..110: note = TnsF-Tn7 System Protein
MTGKLDYRWRLREIMATRGMFSTTDLRPLLAERGIDLSTSQVYRLVTEKPERLSLKILMALLDILGCSMEELIEPMAVAGAARRKTAVGETGGEPGVGALRPKRARVLPK

SEQ ID NO: 6169 - protein, 769 aa, synthetic construct
  REGION 1..769: note = TnsF-Tn7 System Protein
MVTAVAGGRAKSRMLAAALARRPAVLNDGRSPAPRAVGDLLIALRKAGAQATSPPVCAECGKHLRTLQRRGQDWYCGVCGPTTFEPCTGCGKTRRVSTRDRAGRPRCVRCRDIDGRDPLAVIRGVIAGLDPHADPDVVADVVRHSALRPANQQKIAWALEADPSLLTGNGHLAPFPVILRLIDRLIDAGVAGIVRPACPRCHRAVRISKPLDGQRVCRNCIAKSRVEECARCGTRRDPATRDDQGRPLCPNCLITDPTNLETCIVCGRRRLVNTRTPDGPICPTCRPLPTLVCSICGRTAPCTLSRLTDRPRCGACDQREARCTGCGSFRRVHSGTPQEPVCGPCTKPDAELWRPCPVCGQAERLRAPGPCRRCVLKHRLDELLVGPSGAVAPKLRALHEALASTERAATAIHWLSGGIVSTVLSDLGSGRRPLTHEALDELPDGKVVEHIRSVLVAAGALPSRDEQMIRLERVVSDLISSHSTAEGRQILHRYATWHLVRRLRHRTSGEDVTHEQLVVVRQHLRAAVILLGWLAEQGLTIATCRQADLERWLTSDDARLRQEAGHFVRWALARKIASDLSFPAVKWTGPSRPMDDEARWATARRLLHDDSIRTEDRLAGLLLLLYAQWPSAISRLTVDHIEETGGAVRIRLGDVPIDLPEPVADLALQQVAVRRSHAVLPRTASPWLFPGGQPGRPISAWAMGERLRKLGIRLAQTRSTALFQLATELPAAILARTLGIHITVAVKWQRAAAGDWGAYAAEVSRRNGS

SEQ ID NO: 6170 - protein, 365 aa, synthetic construct
  REGION 1..365: note = TnsF-Tn7 System Protein
MALAVVRNISSARALPTQRDIEDFEQEIVDQFALSMAAANLTDSHIGNARAAIFEFARTLNGPLWTASCDDADRFLTGLRLEGRAHSTRVGKAGMLAYFYDFVISRYQGDIHALTGSVVQQPIDEYNRPSSPVFANVRIPPSDAEVDQLFGQWRTSVSEARKYLPAARNYFAASLWRRLGLRINEARMLDIRDWRPDLGTFGKLHVRHGKGSRGRGPKPRLVPAINGADRLIDWWLTDVRHQFGPDWSHPDAPLLPSERHDELTGHCTRINHSSLRAGLASATELWLPAWAGRLTPHVLRHYCASSLYGDGMDLKALQELLGHEWLSTTTRYIKPRELHLTGEKPQVASSRQEVEGLQRYYQLTA

SEQ ID NO: 6171 - protein, 769 aa, synthetic construct; identical to SEQ ID NO: 6169
  REGION 1..769: note = TnsF-Tn7 System Protein

SEQ ID NO: 6172 - protein, 107 aa, synthetic construct
  REGION 1..107: note = TnsF-Tn7 System Protein
MQWNLRLKAAERGIWKSTEMRRLLAEAGLEISAGKMSALWTGTPTSIRLDDLDVICAVLDCDPTALLIREPEKVAARRPPEQETATASNAGPVVAPRFGRPRSQPPL

SEQ ID NO: 6173 - protein, 367 aa, synthetic construct
  REGION 1..367: note = TnsF-Tn7 System Protein
MVHQRKVALAGAAHLELVSGVVQLRPEDAMFDAMLRGWRAQQKSRGLQDETVDDRERLVRRFFEFTNEYPWQWTPGHMDEWSASLTGEKHLAPSTIRSYQGDVRLFTEFLIDARYGWGPACEEAFGTGPVAIAHEWNTLPHLQDYEGDPEARPFTREELQRFLDYADDQVDRAVKSKRKGALAAYRDATLFKVIYGWGLRRTETSKLDVVDFGRNPKAPQFGRYGTLNVRYGKAKKGQPPRRRNVLSVMDWAVDAVADYVENVRPRFGFPDHPALWITERGGRLQPGSINDRFEAYRDALKLPKDLVPHSIRHSYVTHLTEDGVDRRFIQQQVGHECDSSTAIYTHVSDDFVNTALSKALAPAFAGV

SEQ ID NO: 6174 - protein, 524 aa, synthetic construct
  REGION 1..524: note = TnsF-Tn7 System Protein
MSTHTRDRASASPLFVPRKSDRRTARAARDQFAAARDKARHAARPEDRRAEPGIDPELRATYPAVGRPGPASARGGRLKLPAHRMTTATASGAYPFLAEGGLGAQGIYIGRDVHAEAAFTYDPFALYGRLDGFTNPNILLAGIIGMGKSALAKSLALRAVAFGYRIYVPCDPKGEWTVVAQELGGQTIALGPGLPGRLNPLDAPARPHGVAEEDWEGEVRKRRLLLLGSLAKTVLRRDLHPMEHTALDVALDQTVAHAEANGTTPLLGDVAHVLGSPERLDCALGELTGRLGHAAEDLAHALRRLVHGDLAGMFDSPSTVTFDPSAPMLSIDLSRLGGAGDDTALVLAMTCASAWMESALADPTGGRRWVIYDEAWRVMRHVALLERMQSQWKLSRGLGIANLMVIHRLSDLLTAGDAGSRGRALAEGLLTDCSTRIIYRQEADQLTSAAALLGLTGVETQAVSALTKGRGLWKVAGRSFITQHLLHPRERERFDTDARMHAKGAEFTKTEAPLLPLRVREVQR

SEQ ID NO: 6175 - protein, 524 aa, synthetic construct; identical to SEQ ID NO: 6174
  REGION 1..524: note = TnsF-Tn7 System Protein

SEQ ID NO: 6176 - protein, 116 aa, synthetic construct
  REGION 1..116: note = TnsF-Tn7 System Protein
MVAKLDYRWHLRKVMADRGMFSTTDLIPPLKERGISLSSSQVYRLVVERPERLSLKILMALLDILDCTMDDLIEPIAAAGTVRKPKKAAAGGSETPAEGLGGLRPKRARIRGVDHP

SEQ ID NO: 6177 - protein, 271 aa, synthetic construct
  REGION 1..271: note = TnsF-Tn7 System Protein
MRRYAVWHVLRRAKRRPHRPATRHHARERLLLAVRLLAWLEAEGHELEELSQADFDRWLVGGPPARAEIRDFIRWAQRQGLVGDLRVPLRRHSQPSDFLSTDQRWEALHRCILDTSLPLNVRVAGALLLLFALGPTALTTMKVEQVVEHDDGVELLVGRTPIRLPHSVADLVLQQRKVDDEALTGWLFPGQHPGRHLNPGSLAARIKQCLGIGIRPSRNAALAHLAKELPVPVLADYLGLAHTTASQWAGLVERQWAKYIVLRRAGEPGAT

SEQ ID NO: 6178 - protein, 271 aa, synthetic construct; identical to SEQ ID NO: 6177
  REGION 1..271: note = TnsF-Tn7 System Protein

SEQ ID NO: 6179 - protein, 403 aa, synthetic construct
  REGION 1..403: note = TnsF-Tn7 System Protein
MFEQLWQIIALVVGIAIVGVGLVVGFLRSRGGKTRDLPTPPPSTRPTTWYAGAPGDEADSPSRPAAGATATDVLEPEVETEVPVEVIPEAPAYERPDSARGRLARLRARLARSNTAIGKGLLALLSRGKLDEAAWEDVEDTLLGADLGVEATTELVDSLRKQVLIDGATDEEAVRGWLRKDLLALVDPSMDRRIASTRAEGRPSVILVVGVNGTGKTTTVGKLARVLVAEDRDVVLGAADTFRAAAADQLQTWGERVGVPTVRSDREGADPAAVAFDAVKAAAELEADVVIIDTAGRLHNKTNLMDELGKVKRVIEKQSPIDEVLLVLDATTGQNGLEQARVFASVVDVTGIVLTKLDGTAKGGIVVAVQRKLGVPVKLVGLGEGPDDLAPFDPAAFVDAILD

SEQ ID NO: 6180 - protein, 403 aa, synthetic construct; identical to SEQ ID NO: 6179
  REGION 1..403: note = TnsF-Tn7 System Protein

SEQ ID NO: 6181 - protein, 107 aa, synthetic construct
  REGION 1..107: note = TnsF-Tn7 System Protein
MIRKMGYAWHLRQLMATQDMFQTSDLIPHLEERGIHLSREQVYRLVTQPPQRLSMDTLAALCDILGCQPGDLITVSVVNREVAKTGTTKRGEQPAVRRTTIRRPKGL

SEQ ID NO: 6182 - protein, 311 aa, synthetic construct
  REGION 1..311: note = TnsF-Tn7 System Protein
MLQAAEIRQLLDEYTEWVIERQSVRNALDTLSRVVEILGRIESTDDYSGVLTADTFERALTTEQVRRSGVFAQFLTEKKLLVRSATERAAASELRRVSNVLGEVKNRPWSDFIQSYASDLNTPNRKLSARSQRMYLRTAVELLAHSEVRRVGDLADDHIRSFLRSKPGHRASLFSLVSYIKEKYDRQLTIPPSKQKHAPSIKSVVDEVRRLTVAARTAEPLGARRAYVAKLISVLFGVSLEHVLSLDQTSLRRSPDGTKLQVKGQWMVVEAPIDELLLGVAGESAKLFPGRLSTDSLSVSGALYHIQSVDT

SEQ ID NO: 6183 - protein, 230 aa, synthetic construct
  REGION 1..230: note = TnsF-Tn7 System Protein
MDFTVKDATSRKGVRNVISNRLVITGYTSIAGVGLVPYEGQLERDFLEQIDFSRSASYVGAQPLRLVFNDDKRRRYTPDFLLKFKPKEARPALSPALYEVKLRSHLRDQWTDLRPGFQRAALLCRERGWRFRIATERTIRNPRFERIQFLRGFLDRKDHDCIGQILYRVMNELKVSTPAELLAASFSSLDRRLEAVGILWKLVADGRIKIDLSRTITMASPIWSMWHERR

SEQ ID NO: 6184 - protein, 365 aa, synthetic construct
  REGION 1..365: note = TnsF-Tn7 System Protein
MKHIAHVPKVKPGESLTSLLLRLAKNHSASGHELCTLLWPQHQFWTRDIDRTVSDAQLEAIARITGLTKEVLVKATLRNMVRATGFKERIPGYQRGILPVGIYHRVRRRFGQQYCWMCLDEKPAYLRVQWRLEFMVACPKHGILLRDSCPECDAPFIPHRKHALTTAKCHSCGALLRGGDQDRPSKLTEDLQSRILAILDGAIRGAQESVDQLPPTRIGAMPGLEIEAQDFLDGVHRLCRLAARATDALPKPIIHNRVVWAFLRTKDRAIVLDRVASWIDGWPNSWISWATNRGLSQHYLTDEYGPWPDWITTAMTQIPYSLGPVNFKHKRVRITWASLRKAHRNVASYRQARAKLLLGRSGLTR

SEQ ID NO: 6185 - protein, 667 aa, synthetic construct
  REGION 1..667: note = TnsF-Tn7 System Protein
MSVVRSTLTPGGFINLAQGAYASYGGRTCKIRRVISLDCVVIQYVDGDETERVHPTELRPVVEAPTDKGSSSEASDEGKAAAKTTSASNQTNLDEISDPDWKQAKANLEIIKPLLENPKRTRADVEAVAKANSVNASTIYKWISSYSSTGHVSGLVSAKRGRKKGTKLLSPEQEAVIEEEIEKYLDPQAITPATLIDDLETRFDELGLPRPHPNTIRNRIADIPLKRRISSRGNTELSQQRFDPAPGKFPDGKHPLDCVQIDHVQLDIKVVDSDTRQTIEKRPWLTLVIDCYSRMIVGYFLSLMHPSAFGAGVALYMGMMPKRDLLAELGLPGRWPVFGKIRKIFADNAKEFKGSVLQRACEEHQIDLQLRPVKTPKYGAYIESMVGNVNKQLHKKPGTVHRSPNVSPDYDSSAEAAYTLATLECEIVDWIVNRYHVSVHSSLNTTPLKKWERGLLGDSKAAGIGLPPIPANPEKLRLDFLPFEKRAVHPYGVEIDRFYYHEVLNRWIGEPDPDDSGKKRKFIFHYDPRSIRLIWFWDPEVKRHFEIPLRDPNWPDISWEEYREYVRTMKQEGASHVDEAAIKGYVQRSKLRTQTEVEKTQQAKGRGKRSAPKDAHKDPKNTAPGAERYAATSAASSKNPKAEGDAQGGDADNIFNKPAAPFEDIDI

SEQ ID NO: 6186 - protein, 236 aa, synthetic construct
  REGION 1..236: note = TnsF-Tn7 System Protein
MGKLDPTVALFGGSLSGGTPRPGEISLAHHGTLFLDELPEFQRGVLEALREPLESGQIHIARAARRAEFPARFQLVAAMNPCPCGWLGHASGKCRCTPDQVARYRGKLSGPLLDRIDLMLDVPAVAEADLACRGDGESSATVRARVGAARERQQRRQGKPNALLAPDEIDMHCLPDCDGAALLKRAMQQLGLTARAYHRILKVARTIADLADLAEGLPLSAAHVAEAVHYRRGLAN

SEQ ID NO: 6187 - protein, 292 aa, synthetic construct
  REGION 1..292: note = TnsF-Tn7 System Protein
MTFDHLRGAAKNVVLLTQEDRIDFILEDRWIGYSAAKNTLREFDDLIDHPRNLRMPCRALVGDPDNGKTMILRRCIKLHPRRERDDEESHVAVLVFETPPAPDERRLYSRILSALCVTHREDAPPEKLLAKVLERFAELGIRLLLADEFHNMLNGSASGQRQFLASLKSLINTLRVPFVAAGTNDILRALATDSQFFTRFEKMSLPRWGANDETRSLLSSFELTLPLANPSGLGNSKELLDPIVRGGKGTIGGITKVVKGSAIRAIRSGQEKITKDIVDETVKEIRAREMSE

SEQ ID NO: 6188 - protein, 292 aa, synthetic construct; identical to SEQ ID NO: 6187
  REGION 1..292: note = TnsF-Tn7 System Protein

SEQ ID NO: 6189 - protein, 493 aa, synthetic construct
  REGION 1..493: note = TnsF-Tn7 System Protein
MARPRRPSDPTTWPEPCSRCGEHHQLVVSWPDGRICGYCYLAAKRTRGTCSCGHTGVLPGRINGRPACRACSGVKLNIDCTACGAEDELYDGGRCWRCVLSVTVERLLTNPDTATMHPALVPVAAALSAMDRPNSGLTWINQPHVTAFLADLAVAPTISHKSLDALPASRTRDYVRGLLVEHGALPRRDELLARYTTWSNHALDRLPAGEHRGVVRRFVNWHLIHRMNGTPGGISYGTFLRSKQTTTVTIDFLTWLTARGTTLDHLSQADLDAWQASGPTTREFASRFLTWAIKAHLVNSDLRMQPHRRGTADTMPSSEQARAVQTVIHHDHLPPRDQLAAILVLVFGQQIEDVVRLTWDHVMITEDLATITLGQTPIALPAPLDQPLRQLHAEPGHGRTAAHPNTPWVFRGDSPGRHLSAAHLRYRLKTVCPTRPSRLGTLGDLTKTTPIPVLAEILGYNPTTLERHALAAATTYGHYIAARQRDVGMADLT

SEQ ID NO: 6190 - protein, 493 aa, synthetic construct; identical to SEQ ID NO: 6189
  REGION 1..493: note = TnsF-Tn7 System Protein

SEQ ID NO: 6191 - protein, 897 aa, synthetic construct
  REGION 1..897: note = TnsF-Tn7 System Protein
MTDDTRSPAERYAAAMARQAAGRTELARFLRTLPFDLDPFQEQACAALEEGRGVLVAAPTGAGKTVIGQFGVHLALAHGTTVMYTTPIKALSNQKYAEFRALHGPERVGLLTGDVTINPHAPVLVMTTEVLRNMLYNESRSLESLEFVVMDEVHYLADRFRGPVWEEVIIHLPPRVQVISLSATVSNAEEFGQWLTLVRGDTEVIVWEHRPVPLWQHVLVGARLYDLYSPTLTNRERTNPELLAAVRRESGPRRGGPRRRRAPRAVVVAELDRHGLLPAIVFVFSRAGCDAAVDQVVASGLRLTTDAEAAEIRRFVEERCTAIAPEDLGTLGFLRWSQALERGVAAHHAGLIPLFKETIEHLFTLGLLKVVYATETLALGINMPARSVVLERLTKWDGSSHQKLTPGEYTQLTGRAGRRGIDIEGHAIVVHDEDVDVEAVAGLASKRTYPLRSAFRATYNMSVNLLGVMDRPQAREVLQTSFAQFQADRGVVGLARQVRKLEEVIAGLRGQADCERGDFAEYWSLREAITAEERRLSAERSRTARQDVETALARVRPGDVIRFRLGRRPHHGVVHAVQQTPYSGTILDVVTEDARNRRLDGADLGGVAVLGTLRGAARFNPRTPRGRADLAAQVRAFAEGHMRDKPREPVAAADDRQDLDRLRARLRAHPCHTCPDVETHARWARKYARAVADREGLLDRISHRTGTIAAGFDRICAFLQELGYLGPDDSITPAGDILRMLYSERDLLMAECLREGVWNPLTPAELAGAVSLIAYESRNEAPGRLDVRSSALRTAIQATQRIWSRLEEGERAHGIERTPVPDPGLAGPLQRWAAGEPLSVVLADDELTAGDFVRWSRQVLDVLGQLADVPGLPPHLRQRARAAHAALNRGIVALSSV

SEQ ID NO: 6192 - protein, 897 aa, synthetic construct; identical to SEQ ID NO: 6191
  REGION 1..897: note = TnsF-Tn7 System Protein

SEQ ID NO: 6193 - protein, 344 aa, synthetic construct
  REGION 1..344: note = TnsF-Tn7 System Protein
MLDGWRAQLLARGLTTAFIQSSCRLVERFQEHSNEYPWTWSAHHADEFFADRRSGEKTLALSTLRANAGAIRAFCAYLTDSRYGWAALCERVFDSVPTQVVFEWNSPRHTTDDAVPPRRRSLTKPELQTFFDTADDLVDAEFAKGSKRWLPALRDSIAFKVAYAYGLRRRELAMLESVDFGPNPHVPAYRHFGAVQVRWAKGTRGSGPRRRTVLTTPEFDWVVALLEFWLSPDGRERFPTADRSTLMWPSERAGGAALRTFDRSFHQFRELAGLPAELSLHALRHSYVTHLIEAGYDPLFVQQQVGHSYSSTTALYTSVSADFKHKTIQRMIARRIGTEGATHE

SEQ ID NO: 6194 - protein, 287 aa, synthetic construct
  REGION 1..287: note = TnsF-Tn7 System Protein
MTTSTHAVPELSTATDRVLGALAQHLPQYSPAELRLALRMARVDTGDLPELAVFLEQHDDALAVSRSAVPAGYPPLAHVLSVTTAAPVATPRCAACGRASFFLPHLTLDGRWCLACVHQKRPRRQGRVREPCAFCTKVSRVQARWPRGTVGLCCYHKVLRSRTPCGGCGRVLPLIGLSPDRMPVCGPCAGSPRDFACRTCGRTGDNHSANACTRCALSARVAAVLTGPEGTIAGHWEVLREKLTTTADGVRRCQLSLGPSSPKQVRNAETSSRVRAARDQRHERSLG

SEQ ID NO: 6195 - protein, 108 aa, synthetic construct
  REGION 1..108: note = TnsF-Tn7 System Protein
MMSKKMTFEWHLRMRMAERGMFQTSELVTPLAERGISLSREQVYRLVTTPPQRLSMDVFAALCDILGCEPNDLIEIKVAPAQQQRRKAAGTTATPTVRRSTIRRPDLS

SEQ ID NO: 6196 - protein, 510 aa, synthetic construct
  REGION 1..510: note = TnsF-Tn7 System Protein
MTTEPPAGLTRRNTARGRPRTNGSVQCSRCGRAAGRARATWPEGKICGPCFTLATRTRGTCPDCGQHRLLPGPPSGEGGPRCAPCAGIHHDFHCTRCGHEGEFYRRGICARCALRDDLTALLLTNPDDPKSAARLINVLCEAERPESVITWKRSPRVQALLASLSSGQTPLTHEGLDSHSDSAGRAAEHLRALLMHHELLPQRDPYLSRFETWIDDKLRALPAEVAKPIEQFAKWHHLRRIRVMATPDSTARGPVHAAKQEITETIKFLGWLWQTHQRTASTSTQQDVDTWLSTGPTTRKAIRTFFVFAKKTGTNTRVEIGHYKAKSRPAITQEERLAWLREMLTGNSESPPYRVAGILLLLYAQPLVRVAALRSDAISVNDNTGTLSITLGTHPVPVPQPFAELLTQYLQNRPNLRTGSGSDSPWLFPGTRTGQHLHPNTIMDRLRSLGLELRGARNTALDEHLSAAPPPLVADALGFSHQVAFLHSEASAQPWARYADLKANHNVPPS

SEQ ID NO: 6197 - protein, 510 aa, synthetic construct; identical to SEQ ID NO: 6196
  REGION 1..510: note = TnsF-Tn7 System Protein

SEQ ID NO: 6198 - protein, 786 aa, synthetic construct
  REGION 1..786: note = TnsF-Tn7 System Protein
MAAVPLADSHEMIRVHGANENNLKNVSVQIPKRRLTVFTGVSGSGKSSLVFGTIAAESQRMINETYSSFVQGFMPNIGRPEVDLLEGLTTAIIVDQERMGANPRSTVGTVTDANAMLRIIFSRIAEPHIGSSNAYSFNVPSVSASGVMKVTKGGKEVAEKKTFNQTGGMCPECEGRGQVSDIILDELYDSSMSLAEGPFKIPGYTADGWAMRIFSGSGFFDVDKPIAKFNESEMHDLLYKEPTKVKIDSINLTYEGLIPKVQKSFLSKDRDALQPHIRAFVDRIATFKMCPACDGTRLAEPARNSFINGKNIADLCAMQINELAVWLRSLEAPALGPLVENLQHTLDQFVEIGLGYLTLDRPSGTLSGGESQRVKMIRHMGSALTDVTYVFDEPSVGLHPHDIQRMNELLQRLRDKGNTVLVVEHKPEMIEIADHVVDLGPGPGSRGGQICFEGSVEDLRKSGTVTGKHLDDRSTLKASVNKPKGTLQIRGASENNLQSVDVDVPLGVLVAVTGVSGSGKSSLVHGSIAKNDGVVSIDQTAIRGSRRSNPATYTGMLEPIRKAFAKENGVKPALFSANSEGACPTCNGAGVVYTELGFMATVGTTCEDCEGKRFQPEVLEYRLAGKNIHEVLSMPVDEAEAFFGEGDAKIPAVHKILQRLSDVGLGYLSLGQPLTTLSGGERQRLKLATQMGDKGEIYVLDEPTTGLHLSDVEQLMGLLDRLVKSGKSVIVIEHHQAVMAHADWIIDLGPGAGVDGGTVVFEGTPAELVADASTLTGRYLKEYVTA

SEQ ID NO: 6199 - protein, 786 aa, synthetic construct; identical to SEQ ID NO: 6198
  REGION 1..786: note = TnsF-Tn7 System Protein

SEQ ID NO: 6200 - protein, 368 aa, synthetic construct
  REGION 1..368: note = TnsF-Tn7 System Protein
MAVDGSGRVYLLGSIPLLHPEQQTLDEMLDGWRNQQLSRNLKFDTIDQRARYVRRFVDHVNEFPWNWTPAHVEEYFGDLRSIRRVSHATLRAHQSALRHFTTYVSNPDYGWDRACEQLFGTHPSQVFYEWNTATHVQGFEGRPAKRPFTKEELQRVFDHADDEVGLIEASGKKGWKAAYRDTVMLKVAYSYGLRFNELRHLQSVDFATNPRARGFGRFGVCKVRFGKSRRASPPKPRSVLTVFDWTAGILEDWLANGRGTLHTPDLFPSERGGLIVESTLLRRLRRYLDELGMPSDGLDLHSLRRSYATHLLEAGWDPRFVQYQMGHEHASTTGIYQFVSDDFRNTTLRASLDRTLGEALGPQSGGEQ

SEQ ID NO: 6201 - protein, 112 aa, synthetic construct
  REGION 1..112: note = TnsF-Tn7 System Protein
MKRQVEYTWRLAELMAVRGLHNTTDLIPLLAERGINLSRPQVYRIVNQKPERVALQVIAAICDIFSCGPEDLITVTAADVRARKTGTNNSPNVVDLNRTVRPRRARIIDDDD

SEQ ID NO: 6202 - protein, 799 aa, synthetic construct
  REGION 1..799: note = TnsF-Tn7 System Protein
MSARRQRNRNRYAGDPTEAAQERLLGHVLAATSGRLSREAARALLEGANAWTFIPMRQLDQHLTARPDALLAPDPHAPRVFLRLVYALVDAGFGDAVTLPGCASCGRSLPDLQRGRPHPDGIGRCCQPCMLKIEQIICARCGRPGDRAARRDEGVICRSCYSTDPARQQPRARCGRRRQPTRRTPDGEPLCQGCAPRPVHICATCGLSAPAHALTSEGPICRRCYQQPERRCGGCGRTRPIKQRAIGGDPDLCSACNQSPVSECGVCGRWRHCQRGPDGALRCPSCRPRPLRECAVCHRHRTTQAFWPLGPVCSTCYSATVNNPCPCSICGQHRVLVGRDDGGAGTCGPCAIRVAGPIETRANLDYLCASCGEAGDLYAAHRCARCVLTDRVSDLLGDENAVIGPQLLPFADALVDAAAPRNVLAWLRRSDSARLLAELTSTGTPVTHDVLDQLLQSPRMAAVDYLRKLLIATNVLPDRLEPLARLEPWLDAQLADQPAEHQRLVRPFAQWVVLRKARRAANRGRYTGSSANADREDIRQALVLLSWLTERHLTIDDLTQAHLDEFMALARSKRRRAVRAFTAWTAARRITPELTIARRRDDTPSRFIAEEHHLDLLRRCLTTGDPAPLDVKVAGSLILLYGARLSKIHSLTIDRLSRDDRGTYLAIDSVAVLLPPNLAQLVNQLIAEPPRTFGLRPTTPALTTYLFPGRPPTRPIGPAHLGARLRRHGIPVGAARNTALIALAAELPAAVIADLFGLTYKTASAWSNYAQADWTAYLNSRPRPDATVQRIQPEDNANG

SEQ ID NO: 6203 - protein, 369 aa, synthetic construct
  REGION 1..369: note = TnsF-Tn7 System Protein
MRRDDPGSASLVLAPNVVHLDPAPVVFEEMLRGWATQQRSRFLAEATVTQRLRLTRRLAEFSGLYPWQWTPAEGEAFIAHLRGGDRPLALSTARAYEVDLRMFCEYLLDARYGWASLCVDRFGMAPQQVFHQDNSVIHVEDYEGDPSRRPLTYDELQALFDAADGRAEQIRARGVKGALSALRDAAMLKLTYAFGLRRREVAMLDLVDVRSNPKAPQFGRCGMVMVRYGKASRGGPPRRRTVLLVPEMDWMVPVVKHWLHEVRPALGPGKHPALWVTERRGRVSTRLVNEAFVAAKKAAGLDPALDPHCLRHSYVTHLVEFDYPVKFVQDQVGHKFASTTAIYTGVSNEYRNQLLQRALQDRLGRMWEA

SEQ ID NO: 6204 - protein, 799 aa, synthetic construct; identical to SEQ ID NO: 6202
  REGION 1..799: note = TnsF-Tn7 System Protein

SEQ ID NO: 6205 - protein, 108 aa, synthetic construct
  REGION 1..108: note = TnsF-Tn7 System Protein
MIKKMGYRWHLRQLMAGKDMFATTDLVPLLAERGVTLSREQVFRLVTQPPQRLSMDTLVALCDILGCTPNDLIEPQVVNQTVRKAAAGGGKVALPAPPRAAIRRPQHG

SEQ ID NO: 6206 - protein, 384 aa, synthetic construct
  REGION 1..384: note = TnsF-Tn7 System Protein
MALRTVMLALYTPPQIEHRCKYSQWTHLLRDLAAAHHDIAHAHLDALPQDNHVRLLRHVLVDTGALSPRSRLTDAVDPWLQHYLADQQPDVAALLRPYAAWSVLRRARHRAARGLDSPSTPKYVRTRIAVAAQFMAWLATRDTALSTSTQADVDLWLSQGATTRHRIRDFLHWAHANGYATDLTVIPLGRTGLATHLLAEDTRWALLRRCLHEDTTPLELRVAGALVLLYGYIPTRIVELTRNDLTTDESGTYLTLAAHPVLLPPALAQLVTRFAEQHSLPSDIDSPPWLFPGARRGHHRDPGNLTKRLNTELGIFVRPARGAALCDLAADLPSPVLAELLGVSASAAARWTALAARDWTTYIARRTHRETPPIIDDESSGTRR

SEQ ID NO: 6207 - protein, 384 aa, synthetic construct; identical to SEQ ID NO: 6206
  REGION 1..384: note = TnsF-Tn7 System Protein

SEQ ID NO: 6208 - protein, 260 aa, synthetic construct
  REGION 1..260: note = TnsF-Tn7 System Protein
MNQVNFDQTTSEQPAVRVRAARRRYDLGDETVNALNDLSVDFHRRTFTAVMGPSGSGKSTLLQCAAGLDRLDGGETFIGDVEVGSLSEQARTLLRRSKVGFVFQSYNLIDSLTAIQNLELPLRLAGRKPDRSRITAGLTRVGLADRMHHRPSQLSGGQQQRVAIARALVSEPEVVFADEPTGALDSAGSRSVLELLRSVVDHEGQTVVMVTHDPTAASFADRVLFLRDGKVVDDLQHRRGLPGDNRTAAQIAARMAEVRA

SEQ ID NO: 6209 - protein, 260 aa, synthetic construct; identical to SEQ ID NO: 6208
  REGION 1..260: note = TnsF-Tn7 System Protein

SEQ ID NO: 6210 - protein, 2073 aa, synthetic construct
  REGION 1..2073: note = TnsF-Tn7 System Protein
MMGLHKLTAGDGYTYLTRQVAAADSTERGAASLADYYSEKGESPGQWTGTGLTGLETIDAGSPVSEAHMKALFGDGLHPEADTMYAEKFAAALAGGASTKDAERAASAAIKLGRAFKIDNGASDYRVACAKAFVEHNLAGGEKWNAAIEAEARATIRTRVATEMFGREYGRTPADERELSGWVAKSGRQNTKAVAGFDLTFTPVKSVSALWAVAPREISQEIEAAHDAAIAAALDYLEEHACFTRLGNGGVAQVDANGLIAAAFTHRDSRAGDPNLHTHVAISNKVSTTLPDGTTKWLALDGAALYRNNVPASEVYNTALEAQLRERIGVDFAERPSVDRSKRPVREIVGLDTRLAERWSSRSAAITVRTAELARQFQIEHHREPTAIEAIRLAQRATLETRQAKHEPLSHAEQRGGWRAEAVDVLGSPAALSKMVAAVTGKKRTRASVDIDDPRWIDVAAAEVVEVVSRARSRYQRHNIRAEAIRQVRTVNPPADRINDLVEAITDRACSTELAVTLGDDLGDDVASDLAPEVMRRRDGRDVHTRHEATLFTTTAVLDAEARIVALAQRNDGVAVADEHVEMALLESAANGRELNAGQRSLVRAMATSGTKLQLALAPAGTGKTTAMTALTRSWQNAGGRVVGFAPTAAAAAVLRQDILTTTDTLAKFVDITKRLRDGKPVSVPQWYADIGPDTMIIVDEAGMTGTRDLDEAVSALAERGATVRLIGDDQQLASVASGGVLRDIHDRVGALTLSQVVRFRDKVTGAAEGAASLALRDGDDAAIGFYIDHSRLHVGSIATVTDDAYIAWSTDRAAGKDALLLAPTRELVAELNTRARTDRLAAAATDGDGKVGREAVLADGLRASTGDTVRTRSNDRRNTLSKTDWVRNGDRWTVENVGADGSLVVRHLELGRTVTLAADYAAESTELGYAGTVHSAQGSTADTCHVVATGDETRQLAYVALTRGRLNNHMYLVTASEGDLHTAMTERGMLPPTAVDDFRAILRRDGAQISAHSTLTAADNPHVNLAPAANAYDYSVATGAEVFLGPDKMAEIDDAAEAEVSGLTDEPAWPVLRGHLAIVGAHGRDPVEALRVAVRSRELGTALDKAAVLDWRLDTSGGHSSGRGPLPWLPAIPAALRGDPDKGESAEWGNYLDARGDSVTALRDRIDADIRSWTPTTAQLWARPFFGAEEPNFDLLSDLAVFRDAHGVDPDDRRPTGPMQLAAASLKAQHKLDKRAERVLGAAHTASALWRPFVDELDTHIAQDPYFPVLADRLAAAARAGIDVHTLVRDSLAASPLPDELPAAALWWRLSGELSAAALDTDADGSVLEPSWTPVLTELLGDKAAARVMSDPRWPSLVATVDAADPSMWTPGQLLGTAYEFLHGGIDPVDHGLTVPAHELATALTWRAEMLVRENHLARTYIGPDVEPLTVEDEETLTADTGVSDTTGAELPEEFAALVEPHIPIRRSKSGPKTGGAGPEAPDASSPSIPDGADADYLASLDALDAPVEYDVPPPPEYDGYDTAPDAYDTEPDAVEPSAVEPYGGEVDPYEAMLEHAKVLALPYPTVTADERVRLLTADLDAAKVEHRALRTAVAVGTSPTLLHMLTALTEMQEQADRQRPARIAMLDARQDWMDTEFEAEALWHRIDTVVRPAVAADVAAAGDDEDARALAQRGLDWEIWRAGFADDAATAARTRAQEAAAEYERVTAADGGEVTTADVITARGTAESIDLAALAELQQEVDRLGGMVLRAENAARRIAMTSTHAAQSTTTRTEVHVQDEVAQEEVAQQDVARVPDSQTVLSPADAALLAKMEQDPIRLVPDAELIAFVDRAGRSRTAPTVLADTEKLYAQLTEQAAAVAAAREVATELRRVRADHEAARSEHAALTDRLATTKRRDRKTLEPAVDDARLRQERLARQVRDTQRAAQDAAGRVRAETSEWPAIVQRAADPDRRAADVAAAAVFDTAITERSRRLRAVTLAGERHAAEQRIRAAAGTDGAVKAPTIEGVTDTENHVAEVSTLNPDAQKSIARLLADAPGPGRVSRPTWTHQRPVPQPDPTTPERGNDNERGL

SEQ ID NO: 6211 - protein, 2073 aa, synthetic construct; identical to SEQ ID NO: 6210
  REGION 1..2073: note = TnsF-Tn7 System Protein

SEQ ID NO: 6212 - protein, 371 aa, synthetic construct
  REGION 1..371: note = TnsF-Tn7 System Protein
MVSATDLPGASHLVLASGVVHLDPQTAVFEAMLDGWARQQRVRFLKPGTIAGRSLKIRRMTEYTNDYPWLWTCSDVEEFIDTRRHCGQRIAVSTARLYEHTLRTFLEFVTDPRYGWPAECMQRFGAAPSQLLHKDNTVVHVNEYEGNPHRRPLTYDEVQLLFDAADSRVDDIRTRHRKGALGAMRDAALLKTIYAFGLRRREAWGLDLTDLRHNPKVPEFGRSGGLFVRWGKSSRGGPPKRRTVLTVPEMDWIVPVLDQWIDEIRPEFGVGAHPAMWVTERSDRMSLRRINEAFTAAREAAGLSTQLDLHCLRHSYVTHLVEFDYPEKFVSVQVGHAYAATTALYTGVSDDYRNRLLQRAMKRHSDVWEQL

SEQ ID NO: 6213 - protein, 109 aa, synthetic construct
  REGION 1..109: note = TnsF-Tn7 System Protein
MTRKMGYHWHLRKIMATRDMFATSDLVPLLAERGIHLSREQVFRLVTQPPQRLSMDTLAALCDILDVGVDDLIEITAVNEQITKTVNSSPVPKPAPTVRRSTIRRPQGL

SEQ ID NO: 6214 - protein, 295 aa, synthetic construct
  REGION 1..295: note = TnsF-Tn7 System Protein
MNIADNITKRVDRYGVFFAEIDRSCSSLEELNQSRLFEVFGGEGLRRGYLIIKFFCEQRALHWDHEKLEDMIENRRIAQLTSHHHSAAWFPILQTYVAQLMEREPPLKSNTVRMYQKAAANFLSTINVSSPEDIAQQYMDSYLKRRRGQIASLSAFSQYLRVSYGIELKLHYKEPMLINKKDRELVQRSQTIFRRLTQIDDPRCAQALLAKLIADMYQIPLKHVLALRVEEVRIDMNGLILWPDSIDARLDGEFLDYFKRWVSMNSGSKFVFSGRNSVQPLSYDSVKYYLNLIGG

SEQ ID NO: 6215 - protein, 209 aa, synthetic construct
  REGION 1..209: note = TnsF-Tn7 System Protein
MNHRSVTGKVAIGGISIPFESSLERDFLIMLDFDPMVVDVFEQPVRITYESDEGRERFYTPDYLVGYDNGERVIYEVKYRANLKDEWSKLKPKFRAALRYSKLNDMKFKIITDAEIRGTSYLANAKFLRTYRDQTPNFSIEEHLVRTLAILGETTPEKLLIAAYWTLENRMKAMASLWRLVAIRRVHVDLRGPLTMASSIWVTAGEGFV

SEQ ID NO: 6216 - protein, 358 aa, synthetic construct
  REGION 1..358: note = TnsF-Tn7 System Protein
MKLEEWPFRVELQPDELLSSFLIRNAHAHGTTPYLFMNYFWPGRALWDRDCDRSADWEWLCEVSELAGVSTEVLATSTLIPFRQSLGSTSLYGDTSLLLSASVYHRTRRRHGLQFCPECLSNHLSWFRRIWRLGFVLYCPEHGIPLMDCCPACGSPVIPHRSLRLDARYCHQCDSCLHNTMTENSCSERLLDLQKLLLNNLLTPSTAEHIGPFHGTALFAAIRSLLSVLTVRISYAAIRDAFNLPETAWLPHDRLQFEHARWPERFLLLELLSVWISDWPASFHLGAEAAGLSQKTFARLRQPKGLREEIQRLKPGSSRNRRYEPKVFDEELLRLKRVDRKAYRKLRAKRLLALALLK

SEQ ID NO: 6217 - protein, 648 aa, synthetic construct
  REGION 1..648: note = TnsF-Tn7 System Protein
MTNSVFLSVKPGSVVFAEGRRYKITHLLGMDSVLADDLETKQTERLRVDRLRPLPPENPQDVDANSIIGRDICDISDEDWAEAQRRFQVIKPLLNDLDRTREKVTQVAAGAGVNTATVYEWLRTFNDAGHLSALIPQKRGPKRGSRQLQAAIEKVIEVAINDIYLSKQRQKPQDVVNHVAYLCKKAGIEAPHPNTVRNRLRELPQAMALRRRGMAEKARNQFEPIMGSFPGAETPLAVIQIDHTEADIIVVEEITRLPMGRPTITLAIDIFSRMVVGCYVSMEKPSAIAVGMCLARAMLPKNEYLVDLDIPGDWPVWGKMGIVHCDNAKEFRGSMLSRACEQYAIDLQMRPVKVPHYGGHIERLMGTSAGEIRTLPGATFSSPRERKGYDSEKESALTLKEFEQRLVDFIVNVYHQRRHSELNVPPRRQWEIGLLGDMSRPGKGIPDIPADPQRLCLDFLPFVERTVQPYGVVIDDIYYYHEVLNPWINAQDLNQLKAKRKFILRRDPRDISVVYFFDPDANQYYEIPYRNAAHPPISVWELRAAQQRLKEEGQAHVDEDAIFEAVGRMRERVEAAITKTKAARRQIHRMNTTHQKAKAREDKTLDTATTEPAAQDQIHPKEQSQTSFSSDDIFSMPIQPFDDLRVKS

SEQ ID NO: 6218 - protein, 296 aa, synthetic construct
  REGION 1..296: note = TnsF-Tn7 System Protein
MSQFEHLEPIVWNAMTLPMEERIAFAHQDRWIGYTRAQEAINTLSDLLSHPRTVRMPNLLLVGESGNGKTTIIDRFRELHPVAAAGGGEPLMPVVVMGMPSEPNESRFWTELLLALRIAHRDSDPVQRKKNQAHSILTYVRCKMLVIDEIHNVLYGHARQQRQFLGVLKNLSNDLKLPIVSVGTRDAIRALHTDPQLSSRFEPFGLPRWQLNAEFLRLLASFERLLPLANPSNLIDRDIAIKLHGMSGGTIGGLSRILKRATAQSIRDRSERITLKTINQIDWVKLSDYGKQAQLL

SEQ ID NO: 6219 - protein, 296 aa, synthetic construct; identical to SEQ ID NO: 6218
  REGION 1..296: note = TnsF-Tn7 System Protein

SEQ ID NO: 6220 - protein, 672 aa, synthetic construct
  REGION 1..672: note = TnsF-Tn7 System Protein
MSPHPVGGAERDLCRQQSSALILAVLPDAPEQAVNDLVAQVTPTRVIARSLRDHLREHPDALTSGASKTPRAVLHLARLLADGPAPGVVRPGCLHCGQKEELVHLVPDGRLCRRCYRLGRTDSCVNCGRVRPVHSRDETGGAWCTSCNRSGGGAMVACLQCGRIRKTTPSDTAMEEEACGRCSGPTTRRCTDCGTVFRAWPVPKDPDRCAPCRGQAHQRCVVCGQRWTSSQDAVCYQCAPSHQRFCQSCQASQGPRPPHACPHCRIIRRLQSALANEQGHIAEQVEPLIAFCAATDRPESLLDWLTRRKGGRLLRDLARNADQEPITHDLLDQQEPGRHVHHLRALLVHCDVLPERTETLERLHRWLEGFLDALPTEQARLVRPFAHWHILRRVRQRPRSRPFSKNGASWAATQIRVATEFLTWLDEQATTLGQCGQQTLDLWLAGRGQRHYAVAAFIDWARSRRLVQQLTVPTHQANRPYRQLDPEQRWRLLQTCLTDDSIPTDVRAAGALLALYGHFVARLTPLTSHDLQNRQGDDYLTIAGTALLIPPAVAEVIRTQLAHRPPHTAAAEGAQRTWLFPGRNTGRPVTTDALTRRLRRHGIDPRLVRNTAMAAWAGQLPEAVVAQLFNIHLSTAVTWAKHTGRDWTDYLAARAQHPIEQDQAHEHSATTQ

SEQ ID NO: 6221 - protein, 672 aa, synthetic construct; identical to SEQ ID NO: 6220
  REGION 1..672: note = TnsF-Tn7 System Protein

SEQ ID NO: 6222 - protein, 527 aa, synthetic construct
  REGION 1..527: note = TnsF-Tn7 System Protein
MSDVMSLPPAGAGASRTERFKDALLQGQAASGAGWVVAPQVAPAAPAVTPLVPGPVRPLAVQAEPDAHVGGLAVPYARVIELRQRVAEQLAQASADTPGMGLADRRQLGQSLVNRIVAEWATAYAATAAPLSARDEQAIRQAVFAELFQAGRLQPYLDDTETENIIISGADNVVVDYRDRPSQRVGRIAESDGELIELINQLVRTQGQGERSLTPASPLLNTRLADGSRLAATAYVTPVPEIVIRRHRTRSQGLEDLRAWGTIDSTLAAFLRAAVLARKNIVVAGSQGVGKTSLMRAMAREIPSSERVVTLEGEYELWLHTDPQGPTVVAMEAREGNGERGPDGRAAGEVTLDELFVQSLRMSARRVIVGEVRGKEVLPMLHAMGEGEGGSMCTLHSRSAEMAIERLVMLAMQAEGTQMTDSLAYRLIANAIDFIVYVRLVDETAIGGSRHRFVSQVLEVTGVGEGGRPSRQHVFGPREEAGRREARAVPLMAPQCLEDLERAGFDRRLLQQPWGAWERPLQAVTRL

SEQ ID NO: 6223 - protein, 527 aa, synthetic construct; identical to SEQ ID NO: 6222
  REGION 1..527: note = TnsF-Tn7 System Protein

SEQ ID NO: 6224 - protein, 97 aa, synthetic construct
  REGION 1..97: note = TnsF-Tn7 System Protein
MAQREMFATSDLVPKLAERGITLSREQVFRLVTQVPQRLSLDTLAALCDILECQVADLIEVTAEQVAERRRAGEAPLLRAAAPSAPRRAVVRRPDLS

SEQ ID NO: 6225 - protein, 356 aa, synthetic construct
  REGION 1..356: note = TnsF-Tn7 System Protein
MADHPNALSAPIPRCPKTLVRLAHLLDEAGFGYAVTRPRCVRCGRTDPLPLRASPQGRCCGWCASKARIKICGRCKQAGLIVTHREDGPICRRCYVKDPLVVTECAGCGKKRAPGSRLDDGTVFCTNCIPRPERECARCGTLARHKNTDDDGEPLCKKCYQAPKRRCGICGEFREIAARQADGQTDACTRCYRGRKGTCAVCGRVRHGRHATARKGAFHCLSCWPRPIRKCFDCGEMKPAHSTWPIGNLCSGCYQRRTQVPAPCTGCGRLRVMVARGADGREICRACCGIDAPNSRCRQCNAPDDIYDDGRCPRCILTDRVHDLLSPDGGTVPPPLKPLAAVLAEAGNPYAVLRGR

SEQ ID NO: 6226 - protein, 342 aa, synthetic construct
  REGION 1..342: note = TnsF-Tn7 System Protein
MKEGWARQQSARFLRAKTITPRLRLIERLEEFTGLYPWQWTPADGEAFIAHLRSGSSPIQMSTARSYEVTIGLFLEYLLDPRYGWIEVCAERFGEAPQEVFHEGNSVLHTVEYEGDPRRRPLTYDEVQALFDAADARPAKIKGQGRKGALTALRDAAILKTVYAYGTRRTESSRLDLVDLRRNRKAPQFGAYGSMMVRYGKSSKGSPPKRRTVLTVPEMDWIVDVLDEWISELRPRLSPDRHPALWVTERVGRVSPRSINEAFVTAREAAGLDEDLDLHCLRHSYITHLTEFGYPARFVQEQVGHSHASTTAIYTGVSNEYRNQLLETALKNRLGDDWSVTA

SEQ ID NO: 6227 - protein, 356 aa, synthetic construct; identical to SEQ ID NO: 6225
  REGION 1..356: note = TnsF-Tn7 System Protein

SEQ ID NO: 6228 - protein, 108 aa, synthetic construct
  REGION 1..108: note = TnsF-Tn7 System Protein
MIKKMGYQWQLRQLMAERGMFQTSDLVPLLAERGITLSREQVYRLVTQPPQRLSMDTLIALCDILECTPNDLIKPEAVNTQVRKTADGQTGDLPVTRRRTVIRRPDGS

SEQ ID NO: 6229 - protein, 536 aa, synthetic construct
  REGION 1..536: note = TnsF-Tn7 System Protein
MFGRCSGCGAIGSVSRRRSRDRQPYCTKCWSKGTCSRCGRERKIGAIWPIGAVCATCYAYTRRHPARCPACAVTQPLIGLDDAGTRICGPCAGVDVDYVCPGCGQAGHIASEGRCYACLAANRAHELLAGTDGNVRAELRPLLDALLGADSPDAVWQWIGEGTPAAGVLAQLVAAPGPLSHDLLDDLPQTLALHRMRQTLVHVGVLRARADYLERLVPWLEDRLADQSAQRAQLVRGYATWTVFRRARQRSQTSGRFTAGSADNARTKLRSTLRLLAWIDEQGLELDKVDQGDLDRWLVTQPRSTSGGAREFVGWARRAHLVGDIDIPKSRARSTLGPISEDDRWRHLKRCLSDDSLPLDARVAGALVLLYGIPVSRITALRADDVSRQGDRTYLNLGTHPLLLPPAVASLLDRQASQAISVTVLHRSNPTGPAWLFPGGFPGRPAHDVLYRKLRQHIPHIRRSRSAALINLAGDLPAPILADLLDLNINTAVQWTQHACRDWSHYLEARIGATTSTGRDKPDVGTKGSQPGNATP

SEQ ID NO: 6230 - protein, 536 aa, synthetic construct; identical to SEQ ID NO: 6229
  REGION 1..536: note = TnsF-Tn7 System Protein

SEQ ID NO: 6231 - protein, 344 aa, synthetic construct
  REGION 1..344: note = TnsF-Tn7 System Protein
MFEAMLEGWERQQRSRFLRAGTIAPRLRLVRRFTEFTGQYPWQWSPGELEAFTSQLASGDRPVVASTVRGYQVTLRLFCEFVTDGRYGWAVECDRRFGEAPVQICHEWNTVAHVVDYEGQPGRRALSYDEVQVLFDAADGRVEEIRARRRKGALAAMRDAAMLKVVYAYGLRRREAAMLDVVDFRRNARVAKYGTFGSVQVRYGKASRGSPPKRRTVLTVPEMDWVVPLLAQWSDELRPLFEPGGHAALWMTERRGRVSVRHLNDAFGAARERAGLPAELDLHSLRHSYVTHLLEFGYPELFVQQQVGHSHASTTGLYTSVSDEFRNRLVERSLERFDDLWEVQ

SEQ ID NO: 6232 - protein, 114 aa, synthetic construct
  REGION 1..114: note = TnsF-Tn7 System Protein
MIRKMGYQWLLRQKMAEHGMFQTSDLGPLLAERGVHLSREQVYRMVTQPPQRLSMDTLAALCDILACTPNDLIEVTVVRAQVRKAASGGGTGTGRATHADKVIKRTKVRRPEEQ

SEQ ID NO: 6233 - protein, 475 aa, synthetic construct
  REGION 1..475: note = TnsF-Tn7 System Protein
MPKIRVKWPDGRICGICFTDATHVYGTCPTCDDENRMLPGRDDSGRAICRNCAGITTKLECAVCGREAERFRRGACARCVVRTDLTALVRPGADLRLRRLVDTLSGVDRPESIYTYMRGARARALLTAIGTRELPLTQDAFDRLEPGPAVEHLRALLAHNRMLPERGVDERVHRFERWIAARLATLPDDGTRDRIERFATWHHLKRVRARALEPDVNIETVTHAAKQEITEAGKFLIWLRSAHGIGSAQLRQRHVDDYLSDGTSTRKHVRNFLRWLNRDENRRSKVDRLDAPFREAQSEPLLKQSERVALVRNCLEWEQVALSTRIAGLILLLWAQPLNKIVMLRHEHTAFGVNGMTLTLGQHPTAVPHAVADLFWQHLEAPGKPRTVNAGTSWLFPGTQAGRNLHPGTLSERLKVLGIDAQRERNATLRDLAQEVDARTLIDLLGYSKPVVARYAARAGGPMSDYVDLKRPKLP

SEQ ID NO: 6234 - protein, 806 aa, synthetic construct
  REGION 1..806: note = TnsF-Tn7 System Protein
MTDALSPAERYAASRRRTALVREFRDGLAFDLDPFQEAACERLEAGRSVLVAAPTGAGKTIVAEFAVFLAMRQERAKVFYTAPMKALSNQKYNEFVDSYGAENVGLLTGDTNINSGARVVVMTTEVLRNMLYADSDLLADLAFVIMDEVHYLADRFRGAVWEEVIIHLPEAVRLVSLSATVSNAEEFGDWLHTVRGDTDVIVSEDRPVPLDQHVLIGGRLLDLFDAKTSSDDPNVNPELVRLAQFGGRALTTKQYDDVSRYNRRRGPQRQERTSRAGTVELLGEHHLLPAIFFIFSRMGCDGAVREVVRAGVRLTEQHERREIRAIVDERTSALQDEDLAVLGFWEWRDGLERGVAAHHAGLLPAFKEVVEELFQRKLLKVVFATETLALGINMPARTVVLEKLEKFNGEARVPITSGEYTQLTGRAGRRGIDVEGHAVIQWVEGLHPQAVASLASRRSYPLNSSFRPTYNMAVNLIDRFGRQRTREILESSFAQFQADRAVVDLARKVREQEASLEGYAEAMRCHLGDFAEYASIRRELGDLEKQRPDAGSAAKRERRARQITSLRKRLKSHPCHGCSDREKHARWAERWFRLRRETDTLRRQINTRTGAVAKVFDRVVDVLVELGYLVQGDMPGGIGLAAPGQALRRIYGERDLLVAECLRRGLWSGLDAPSLAALACCLVYEPRRDDTDVPERYLPRGRFREALVATQEVWSVLDDVEHDHRLPGSDVPANGLALAMYKWASGAALDVVLRDADLAAGDFVRWCKQTIDLLDQLSTVADPPVGVTARKALDSVRRGIVAYSSV

SEQ ID NO: 6235 - protein, 806 aa, synthetic construct; identical to SEQ ID NO: 6234
  REGION 1..806: note = TnsF-Tn7 System Protein

SEQ ID NO: 6236 - protein, 370 aa, synthetic construct
  REGION 1..370: note = TnsF-Tn7 System Protein
MADDDNVVFAPFWQQAPDPELFVAAILEGWAKQQRAKDFSPATIRTRRKLVLSFIDFSGHYPWEWTLGDADDYFSHARAVRNLSHATVRSYQTAIKLFCDYACDPSYDWNEQAAKLFGQVFAQVVTELNRVTHSQPNTGRPQKRTFSQRELQELFDLADLEVHRVLDSGRRGALAAWRDSVAFKSLYGWGLRTNEMRHLQTVDFSRNSRAPYMRDYGVVRVRWGKPHRGSAKKVRSALTVWQWTVDVIEDWIERGLPRYGEPINDVFPTSTGGLVSESHLLDKLRGLIDELGFPPGLDLHSFRRAYATQLITGEGFDVTFAQLQLGHEHAATTSIYTLPSPDYQRAALERAHSRTLDAARTPRPDNRRTP

SEQ ID NO: 6237 - protein, 112 aa, synthetic construct
  REGION 1..112: note = TnsF-Tn7 System Protein
MSRRELTYTWRVREIMARRRIFTAKELAPLLHERGITLTPNAIWRIVSGEPERVSLKMLVALCDALDVEMNDLITYTAVDAKTVRRRKASGDDIPDMSDYRPVRARIVDDDD

SEQ ID NO: 6238 - protein, 499 aa, synthetic construct
  REGION 1..499: note = TnsF-Tn7 System Protein
MSPPVCWDCGSRDRHYTTLPHGRLCVACRRRRHYHPETCPGCTIVRPLAYLRPAHGAGAGAGARRDAGTALVCASCAGQESVFACGECGREDHPYGASRCARCILAERLTVLLTDPTTGRIHHQLQRVFEELVTSDRPQTGIWWLRKMPGVGPRLLGAMARGEIEISHDTFRSLPSDRVHDYLRGLLVALEVLPPFEVRIERMLPWIESVITDLPADQAALVRQFAHWHVLRQMRKAAREGRLTSSITNAARRRIRLAVNFLTFLQAHGATAATATQDLLERYGEHVGGLTSSDHSFIAWLRRTRLNTHSLTIPHVASPSPTMTVSDSQRWDAVERLLRDQSLRTYTRIGGLFTLLFAQPLSRIVAMRTRQVTLATDSVHVTFNTIPIQMPPQLDDLIREHLEHRGKSLYASSDNGWLFPGGNPGRHLVTENIRAQLVAIGIKPYENRKATLFQLAGDMPAPVLAELIGITNSNASDWARLAARDWTTYLATRTHFPRS

SEQ ID NO: 6239 - protein, 400 aa, synthetic construct
  REGION 1..400: note = TnsF-Tn7 System Protein
MLAERLAAHLDDGTGRIRPELVAFHDRVLVMARPRVGILWLSKPHVPPILHALARGTVPLTHDGLSTLSPLRSIVHVRDLLIASSVLPPLDRHLVLFEQWLTGWLGQLSDPDQAQILKHYARWHVLRQLRTAAEAGPVGHYRDQGARHRLRTTEAFLDHLARQGVDLASCRQADLDRWFAGARNFRKQSLRPFLTWAIRAQQMPRLTLPPIREQPPTPISLSQRIDLLRRIQSGDGMDGAERLIAMLILLYAQPLNRITRLTIDDVTRDEQGQMLIRLGDPPAPVPPPFDAIMDSYLTARPNLTTATNPDSTWLFPGRRAGQPLHPTSVRRRLTTLGIPNLPGRSRALREVLLHAPPAVVAGALGYSAGKAETIAAEAGATWKHYAPGDHTRTRTPRTGH

SEQ ID NO: 6240 - protein, 499 aa, synthetic construct; identical to SEQ ID NO: 6238
  REGION 1..499: note = TnsF-Tn7 System Protein

SEQ ID NO: 6241 - protein, 2116 aa, synthetic construct
  REGION 1..2116: note = TnsF-Tn7 System Protein
MSLHKLTAGDGYTYLTRQVAAHDATSRGFASLGDYYEQKGESPGQWLGRGLSGLPGFSPAGGVSEPQMRALWGEGRHPDADRIEARMRAAGHTDREIQAATRLGSRYPVHAGSTRFRTEVAAAFAGYNEAVGLPRDWPVPAPVRARIRTRVADGMFVEEYGRAPADDRERAGFLARVSRQATTAVAGYDLTFSPVKSVSALWAVAPREVAEQVEAAHHAAVADAVAWLEDSATYTRVGAQGVAQVDVTGLLAAAFTHRDSRAGDPDLHTHVAISNKVQTLDSGQGDGRGDGRGGRWLALDGRPIHASAVAASERYNTRVEAELVARLGVRFTERPGTGPGRRPVRELVGADPALLTAWSRRRRAIDARRTELAAVFQVEHGRPPSPVEALHLAQQATLETRGRKHEPRSHADQRATWQTEAAAVLGGPDAVAGMVRSVLAAGGEAPGRAWADRTPAEREEWVARTAGEAVATVQTARATWRQTHVRAEAERLARRDGVPLGDLDAMVDAVVARALSSEHSLPLHAPERGPSDRSASGPLPGVIVEPAALRRRDGASVFEVAGTRRFTSTAIVAAERSLVAAAGRRDGRAAAGDVVEVALLESEANGFRLNPGQVHLIRQMATSGARLQVGLAPAGTGKTTAMRALSRAWTDSGGHVLGLAPSAAAAAVLREELSLDTFSVHTDTLAKLQHTLATQTSDARRQQRGLPGWIAAIGPDSLVVIDEAGMAGTCDLAAVVEFVLARGGSVRLIGDDQQLAAIGAGGVLRDIAATHGAVTLSHVVRFTDPAEGAASLALRAGDPAAIAYYTDQGRIHVGDLGTCVDQAYTAWSADRAAGRDALMLASTRDLVAELNARARTDRLSRNQTAGDLREVELTDGCRVSAGDTVITRENDRQLRFTSTDWVKNGDRWTVTASTPGGGLRVQHLATGRHIVLPAAYVAAHVALGYASTVHAAQGVTADVTHVIASGTESRQTMYVAMTRGRAANHLYLGVAGDGDPHTVISRDTLLPPTAVDVLARILARDGAQTSATSHTRALADPAARLQAAADRYAHALATAAQTRLGPQRLADLEVAAEQVLPGLTEHEAWPTLRAHLAMHALDGRDPSDLLSTLHNTLNTVAARRELDSAHDPAAVLDWRLDPTHLRTATPGPLPWLPGIPAALAALAANSNSTGADTEQNWGKYLAARADLVRALAADVATTASGWTPATAPAWALHLLDRNLDRNHDRDVDQGAGRPLASDLITDLAVWRAATGVPDTDPRPTGSTQIPAARARHQKRLADRATTALGDPRANAARWRHLAERLEPRLLADPGWPDLADRLTVAAHAGIDIAALTTAVAAHHPLPDEQPAAALWWRLTRHLPPALTRTADSSGNHGNGSAALRPDWAPALTALLGADAAARVQSDRVWPGLVAAVTAAVDHGWQPDAVLVTAWELLQAGTTFDGDPHDGDPHGSGHDLRDDELTQALTWRVALLATGHPGPTPVRDPLDADAPLDPDDAPPPPDPFEIPPVLDDTPPTDDASAPTSPRVDTEMVNTTWVTDDADGATDTANAAEPGDWCADVDAQTRAELEAIASRPVADYARAPLPDGQVLDPGSSQTDPTVVPSEPIYQRIHELNQLAHDFFTASYPTSWAARHLQERLGSDLADDSRFSPGYAPAGWRSLVTVLRRAGVSDAEIVAAGLGTVASTGQVIDRFRDRLVLPIRDEQGIAGFVARRNPIHDSTHDGALGSTHDGGGGNGGGVDRHGPKYLNTADTPVYRKGDHLYGLADAAAALAAGAVPVLVEGPIDAIAVTLAGGGRHFGVAALGTALTDTQANLLTSHLTSHVTSHLAPHPRSHLPGQASGVIVATDPDPAGRKAAARAYWLLAARRATPAHLQLPDGLDPAALYTREPSQLRRHLEQPTDLAAALVEDVLAAWAPRLADPDDVAGRVGAARDAIAVLAALPPLAVLEPATRLAHTLDLMPSTVYADLADAVHAWTTNPHAEARRRLQTPLPTATTAALRPPVRRSDGPDWAALAAHRPGLVDDTDWPRLVAALDRAHASTGGVPELFARLAAGDLPDGRPAWYLRHSFIGAMPAAAGPRPVTARGPGEPQGTLPAPPDPPKAPAPAAGRLPSARR

SEQ ID NO: 6242 - protein, 2116 aa, synthetic construct; identical to SEQ ID NO: 6241
  REGION 1..2116: note = TnsF-Tn7 System Protein

SEQ ID NO: 6243 - protein, 389 aa, synthetic construct
  REGION 1..389: note = TnsF-Tn7 System Protein
MTVPGSAHLVLAPGVVHLNEPAAVFEAMLSGWARQQKSRLLAEATIEPRMSLVRRFAAFAESPPWDWTAGDVEDFTASLMSGEDRLAPSTIRGYHLTLRLFCDYLLDGRYGWIAQWEERFGTIPAQVCHDYNTAAHLVEYEGRPARRPFSYDEVETLFGFLDDRVETIARSGRKGALAALRDAQMVKTAYAFGLRRRELCCLDVVDLRPNPRMPDWGTYGAVHVRYAKSSRGSSPRRRTVLAVPEFDWVIAGLRQWVEQARPLLKPGPRQALWLTERKAQVSVKTVDKRFAFLRDQAGLSKDLSLHCLRHSYVTHLIEFGYPERFVTEQVGHSYASTTAIYTSVSNDFKTKTLQAALNRVYGTHPTHGARQDGRPRELPHGGDDKREDL

SEQ ID NO: 6244 - protein, 110 aa, synthetic construct
  REGION 1..110: note = TnsF-Tn7 System Protein
MTTKTVLRWNLRQLMAENGMFHTTDLVEPLHQRGVEISRQMVHRVATKAPQRINLDLLAALCDILSCTPNDLLELAREQVREATAVNDTGPGIGALRPIRARIRRPDQPD

SEQ ID NO: 6245 - protein, 124 aa, synthetic construct
  REGION 1..124: note = TnsF-Tn7 System Protein
MTPAPKKPTRQRRKVSYQWRLREVMAEHKMYATTELVPLLAERGINLSASQVHRLVTSTPERLSLPILAALCDIFAVDAGQLIPTEATSVGVRKVAAGDLPSRTRQTGIGDLRPVRARIVSPEE

SEQ ID NO: 6246 - protein, 458 aa, synthetic construct
  REGION 1..458: note = TnsF-Tn7 System Protein
MRVLAVPSDGQVVCTGCAGVPSPLACPRCGQEDHPYGTLCARCTLADRAGALLTDPATGTVRPRLRPLLEHLVASPNPTAKIRWLAKSTLSTALLGQMAHGEAPVSHDAFRALPPSRQHDNLRHLLVSLEVLEPWEPHLDRFAAWLTAEIVPTVPTGQAKTVERFARWHVLRGMQRHAERGTLTQAVTTSARLRVRAAVELLTMLDSRGLTIETASQADLEDFITGTPGYDRATTISTFVAWADKSRTNTRLTTPWTPRSPPTVTVSDAQRWAHVERLLHDTAARTDVRLAGLLTLLFAQPLNRIVAMRTDQVHLTEHVTVTFASTPIQMPPLLDGLVRQHLEHRTQTSPPGHDAGWLFPGRQPGRHVVTEVFRRELVAIGIKPHENRKAALLHLAASMPAPILAELLGTTDKNAADWARLAARDWNSYLHHRAQTDAVKVGPSTQVSGLTASITRYP

SEQ ID NO: 6247 - protein, 458 aa, synthetic construct; identical to SEQ ID NO: 6246
  REGION 1..458: note = TnsF-Tn7 System Protein

SEQ ID NO: 6248 - protein, 636 aa, synthetic construct
  REGION 1..636: note = TnsF-Tn7 System Protein
MSCHEPSAGATALEAQTAVVALVGNPNVGKSTLFNSLTKARQAIVNAPGTTVEMASGAWKAAGVRLLDLPGAYSLLARSPDEEVTSCTLGGQGSCGAVDLAVVLLDATALSRSLYLAGQVGLTGVPMVAAVTMVDVARARGITVDLQALRERLGVPVVGLDPRAGGDADVLARLVRAALDTPSRLRLPDTLAPETSEHPLAGVDRRFDEAEHLFAWVAQVQAEVSTTPDEHKPTRSDAVDSWLLRPWVGGPVFLAVLWAVFNLVTVVAAPLMDALDWLVTDLLGGWVVEGLDAVGSPVWLTGFVEDGLLVGVATVASFLPLMALMFIAVGLLEDSGYLSRASFVADRAMRAIGLDGRAVLPIVVGFGCNLPALAALRVLPNARQRLLTAMLLPFASCTARLAVYLVLATAFFPGYAGTVVFAMYVLSGLMVIGAGLLLRHTRFRDIERETLVLALPAYQRPRVRALLTSAATRTGVFVARAGKIIVLALAVLWVFMAIPVSGSHAVGDVPVEDSLYGRAATTVAPVFTPAGFGDWGTTSALVSGVVAKEVVVGALEQAYGTSGEDLVDAFDRASGGHGQAAALAFLVFVLVYVPCVAVAAELIRQIGARWTLLSLSGSLVTAWVMAVVVFQVGSRL

SEQ ID NO: 6249 - protein, 636 aa, synthetic construct; identical to SEQ ID NO: 6248
  REGION 1..636: note = TnsF-Tn7 System Protein

SEQ ID NO: 6250 - protein, 651 aa, synthetic construct
  REGION 1..651: note = TnsF-Tn7 System Protein
MKLTAVTVQLFRNFVAPQRVVIEDDVTALVGKNESGKTTILHALHRLNPANGDEVKFDLVTEYPRWRLSRDRRTSNLSETEPVVAEFSPDEEDRTALGEVLPAPLLEATTVTAGRTYANTSFISLSTPLQDVIRDAASVAAVDAEDAEALLGEMSLDDAIAQAKALSKELKESAPARAKALGAFPKAAEERRFLLGGGLDQAQRAALWKRVPKFFYFSSYSVLPGEVDLTKLAEQIERGERLDDQDRTVVALLAHAGVTPDDFLDEDYASRKAELQAAASDLSQQVFKYWRANTDLSVVFGDDKVEMPSSRSVPQHHRFLMIELRDARHGDVETNFSTRSTGFQWFFSFFAAFSEHQNSDEPIVVLLDEPGTSLHGEAQKDLVKYIFDELGTSKQTVYTTHSQFMIDPGRYEKLRAVHDRATREDKEAGVVVTLVSLSADRDTVLPVESALGYTMSQHLFLGSGHHLLVEGSSDFVYLTRMSAHAETTGATGLSPKLTIIPVGGQTNMPAFVALMGRRLEVSVLIDGAKTTATSDRVKRAGGENGIPPNRFVAVSQVGSLPSTADIEDLFAPVDYLRLYNWAFGTTYTIADLPTTGEPIIRKLTALRGGEFDHALPAHALTGHTAEFFKEINEITVERFGRLFGLLNAGLV

SEQ ID NO: 6251 - protein, 651 aa, synthetic construct; identical to SEQ ID NO: 6250
  REGION 1..651: note = TnsF-Tn7 System Protein

SEQ ID NO: 6252 - protein, 373 aa, synthetic construct
  REGION 1..373: note = TnsF-Tn7 System Protein
MRNDVPGAAGLVLAPGVVHLDEPAAVFEAMVTGWERQQRSRGLVDATVEGRIALVRRFCEFAGSYPWDWTPGDVEDFTVSLMSGDKRLAPSTIRVHHLTVRTFCDYLLDARYGWVEQCRERFGRFPQQVCHDFNTVAHTAEYEGRLSRRPFAYDELQHLFDFLDARVEQVRVSGRKGAWAALRDAQMIKTAYAFGLRRRELCNLDVADLRPNPHMPRWGTYGAVHVRYGKSVRGGVPRRRTVLTVPELDWVVDGLRQWVEEALPLFLGDQTGSRPELWPTERGARVGAGSLDHRFAWLLEQAGLPRDLTLHCLRHSYVTHLVELGYPERFVSEQVGHSYASTTAIYTSVSDDFKTKTLQAALARVYPTEEGHP

SEQ ID NO: 6253 - protein, 118 aa, synthetic construct
  REGION 1..118: note = TnsF-Tn7 System Protein
MNVAGESSATGRQVSFRWNLRQVMAARGIFKTSDLVAPLHERGIEISRQMVHRIVTGTPQRINVDLLAALCDILDCTPDDLLELRIEHERAPRHATAGKAGIGDLRPVRAVVRRPAGL

SEQ ID NO: 6254 - protein, 475 aa, synthetic construct
  REGION 1..475: note = TnsF-Tn7 System Protein
MSRPRPPSDPDTWPTPCTRCRGHYEIAAHWPDGPVCRYCYQAAKRTTGTCACGHTGILPGRLDGRPACRDCRTCRAEAELHSGGQCWACVLAATVDQLLTNPHTQQMHPSLAPVAAALKAMTRPNSGLTWLNQPHVTAFLTDLATTATISHEILDALPHTRTRDYVRALLVTHGGLPARDEQLARFITWSQDAIQRLPTGEHREALRRFVRWHQARRMTTTDGETTRGTFLTAKQTTTVAVDFLTWLTSRGTTLSELTQADLDAWQSGGPTTRELADRFLRWAATAQLVDPRLRLQPHRRDTAARMSHPDQTRALARAVDHEELSPRDRLAAILVLVLAQQIDDVVGLTWDQITIDDDRVTITVGAHPVELPSPLDQPLRHLVAEPGHDRTAAHPNSRWIFRGNSPGQHLDASPLRRRLKTVCAPRAARLGTLEELTKLDPIPVLAEILGYHPSTIERHATHAASTYARYIAARQ

SEQ ID NO: 6255 - protein, 475 aa, synthetic construct; identical to SEQ ID NO: 6254
  REGION 1..475: note = TnsF-Tn7 System Protein

SEQ ID NO: 6256 - protein, 375 aa, synthetic construct
  REGION 1..375: note = TnsF-Tn7 System Protein
MEAVPGQVPAVLTDADVGLFRADERVFEAMLDGWRAQMLARGLTSTTIKARYGVVARFQRFAGTFPWQWGPEDLEDFQAQRRSGPRPISITTLRADSSAVAAFCTYLTTPVYGWAAFCQQAFGDVPAQVVFEWNTPRHTADDAIAPGRRAFTRAELQRLFDHLDDHIDREHAAGSKRWLPALRDSIAFKTCYAYGLRRRELTMLEVGDFGPNPHVPAYGRFGAMQVRWAKGTTGSGPRRRTVLTVPEFDWVVGLLRFWTGPGGRARFPAAESTDALWPSERGGRLRLGSLGDAFAALREEVGLPKELGLHCLRHSYVTHLIEAGYDPAFVQTQVGHAHASTTELYTSVSSDFKQKTIQQMIAARLATGLEEVPDA

SEQ ID NO: 6257 - protein, 692 aa, synthetic construct
  REGION 1..692: note = TnsF-Tn7 System Protein
MTGPWASRLEKVAARRVAVTAAVAAADPALPADVIAAAVGAVSGASLRHLADALATDPAALSVGAPPAVGRLVETLIAVGGALPVPTCARCGATGRPLTRQGDGQGLCSRCHNRARATACVRCGIVKPVAGRDPQGQPVCARCADRVQRRCGVCGTVRRIARRAHDGQPDICVNCFTLPEAVCSVCGRRRPCAFASSDAPLCQRCTPRRALPCARCGATRPPAVRWPEGPVCDPCYTAALRHRGTCASCGQTRRLVHPPGVDATTCADCTGLPVTHRCVDCGLEDKLFDAGRCATCSLRRRTTVLLAADDGQVPAHLAAVAEAICATPNPYTALNWLRTGAASALLADLAAGRLPTSHEALDAHPRRGAADYLRTLLVAHQLLPARDEALARAEQRLARRLADVEPPEHRRVATAYATWRVLRRLRRRAEHSRGPRTVTARATQLVHVTIAFLAWLHDHGTTLAELDQHTVDLWLTSGAPSAHDVGDFLAWTAGRGHTRALTVPARPRPTGPATSEDERTALLARLLHDDTVELTDRVAGALLLLYGQQLSRIAALTTSQVHQSGDTVHLQIGTERIHLPKPLASLVPRLRDEGRPHVGVGSPATTGWLFPGLLPGQPITPARLGERLRKLGVSAVAGRRAAITQLAAELPTAVLADMLSMHPTTAARWTAQAGGTWHHYAAELVRDRDYQP

SEQ ID NO: 6258 - protein, 692 aa, synthetic construct; identical to SEQ ID NO: 6257
  REGION 1..692: note = TnsF-Tn7 System Protein

SEQ ID NO: 6259 - protein, 365 aa, synthetic construct
  REGION 1..365: note = TnsF-Tn7 System Protein
MRSRTAGTAALALVDGATPLRAEPVLFDEMLAGFRRQQVSRRLSSSLIDGRERVVRRFQAASGSWPWTWTPAQLEGWVAAGGWAHSTVRNYQGAVGMFCDYACDPRYGWVAECEQRVGLAPSRICHDENMATHVADHEGRPERRPLTRAELQAFFDAADDWVEQLAGSRRKGWLQAFRDAAMFKVIYGWGLRRAEAVHLDLADFSTNPAARQLGSLGVCHVRFGKAMRGGPPRRRAVATVFPWAAGVLEEYLTVVRPQFPGSAGPAVWLTERGNRISTRSVDDRFARWRAAAGLPADLSVHCLRHSYVSHLIEDGVDPLFVQQQVGHSWASTTATYTTVGADAKNRMLTAALAAVLHAVAGTEDR

SEQ ID NO: 6260 - protein, 546 aa, synthetic construct
  REGION 1..546: note = TnsF-Tn7 System Protein
MPRINGDRPVPSLPARHDKIRVPLWVLLVGLAARLVGRLVLLLMRHPIAVAVLVVLTAFYRATGLLGLGTLAAAVVLVSMAWRLAHRSSFNQAAWWAWGRLRLVFVYRRRWRAATVHCGLAIRIPASNAERVTFDEYFPRIRAFRTSRPVESLRVELLPGQTPQTWAEQAEALRHVYRTRACRVRAERVGFVWVDFYRRDSLGRTVAPYPVDGPDAPGAGLENLVVGRREDGRPWLLQLRGSHVLVAGATGSGKGSVLWSLIRALGPAVRDGLVELWVCDPKGGMEMAAGAPLFARFAYDLPSIADLLDDAVTRMQARADVLRGVTRLHEPTRDEPLIVVVVDEIAALTAYVTDRDLKRRLSASLPLLLSQGRAPGVVVVAAVQDPRKETLPFRDLFPVRVALRLVEADQVDLVLGDGAHDKGARCEDIGTDQQGTGYVAEDGGAEPVRVRASFPDDAEIRRTVDRYRLPAAGPVLALPAPSTAPDLVDLLRLRGARAVDDLSPPVRPRRRTWPWRRAAGARPGPHPETGGWVPDLAEYGNPWGDQ

SEQ ID NO: 6261 - protein, 546 aa, synthetic construct; identical to SEQ ID NO: 6260
  REGION 1..546: note = TnsF-Tn7 System Protein

SEQ ID NO: 6262 - protein, 136 aa, synthetic construct
  REGION 1..136: note = TnsF-Tn7 System Protein
MSAQVGYYWHLRKLMAERGLFATTALVPLLAERGVRLSREQVYRLVTGVPERLSLVTLAALCDILGCAPTDLVEPYRGRPRRAADPGASAALADTAPSDTTAPATTAPRAVSSPVVMPLRPRRAEITAVPGPGTGS

SEQ ID NO: 6263 - protein, 736 aa, synthetic construct
  REGION 1..736: note = TnsF-Tn7 System Protein
MPRPSARPCPECDRPRSGRTPGVLMCRCASKRLLAQRRERQHVDRLAALTALIAGLDASVTTERVEAVAAQIAPGWSMQLRLMGLIVADPAVLTAGGSRMPKVVADFLYAAISAGITGLTSPSCALCHRPKTLFHTHAGQRICQDCYNRSHTATCSVCGRDRRVNARTADGAPVCPRCQANTHQGECDGCGRTRTLKRSVIDQRRYCRACRARRTPTEICVICGRDRRVNARDGDGGAICSTCYTRRRVGEQVCDQCGQLAPLHARAGGRGGHSVNLCAGCYTNPRRECGICGRTRRVSVKATASAPDVCPTCHQWPVIDCSVCGRTEPGRRTTNHGQPMCFRCDATAKIDTILTDASGVIPAPLKPVRDAIADRDRPRSILSNLTRTASLALLAGIAQGRIELTHDALDERGRGFSITYLRSVLVATGALPPRDEHLARLERFTTGLLADIADPADRALLARYARWHVIGRATPDRHGHLSANVADRCRGDIRAARQFLDHLNAHGQSTLACTQPTLDTWLATGTRRASFIRWLQRDGHLTAVALPDPPPPTSPGAFNAEDERWATVRRMLHDPGSASIEDRAAACLLLLYAQPAAKIAALTTDDITTDQAGRTYLRLGPEPLLLIAPLDTLITALPLAKPFGTAQVLADHRWLFPGKKAGEHIHPASLIRRLQQLGITTRTSRNTALRHLAATTPPAVFASLIGISTGAAVRWAELAGNNWTTYPAARRAGRRR

SEQ ID NO: 6264 - protein, 736 aa, synthetic construct; identical to SEQ ID NO: 6263
  REGION 1..736: note = TnsF-Tn7 System Protein

SEQ ID NO: 6265 - protein, 546 aa, synthetic construct
  REGION 1..546: note = TnsF-Tn7 System Protein
MPIDTRTSRGDGARRRPRNRRRPAAVTTTSHPQVAAETAYASAPSAAVADDRSFAELGVPAAIVAALAAEGVTAPFPVQAATLPDTLAGRDVLGRGQTGSGKTIAFAVPTIARLVDSRVARQARRPRSLVLVPTRELANQVAATIAPLAAATGLRITTVFGGVGQGPQVKALKNGVDVLIACPGRLEDLIAQGHCDLGAVEVTVLDEADHMADLGFLPAVRRLLDTTPRRGQRLLFSATLDNGVDTLVRRYLTDPVMHSTAPAVAHVSAMAHHVMAVETTEKALVVRELAAGLGRTLLFARTKHGAKKLAKALTAAGIPAVDLHGNLSQGARQRNLAAFSAGTSRVLVATDIAARGIHVDDINLVVHVDPPAEHKAYLHRSGRTARAGAEGVVVTVMTPDQTADVRTLTRQAGIKPTITRVTAGHPAIEELTGPKAPVVTPPPAQAAAATRRGGSSDADGARPDGGRRRRGRGGASGRSAGATGGSGRGGRANGEPTTRGNGRTGSSGRTGGSGRTGGGSGRTGGSGRERSSSTTAGSFSASLRRR

SEQ ID NO: 6266 - protein, 546 aa, synthetic construct; identical to SEQ ID NO: 6265
  REGION 1..546: note = TnsF-Tn7 System Protein

SEQ ID NO: 6267 - protein, 295 aa, synthetic construct
  REGION 1..295: note = TnsF-Tn7 System Protein
MSAALVTRGLGKRYRSTWALRDCDLELPTGAVIALVGPNGAGKTTLLQLVAGLQRPSAGSVSLFGRLAPAESPQALAQLGFVAQDHPVYRRFRVSDLLHLGRSLNPAWDQDLAERRIDELGIPLRQRTGRLSGGQQAQVALALALAKRPRLLILDEPVASLDPLARREFLQVLMATVADEGLTVLLSSHNVAELERVCDHLVVVAGGRVQLVGDVDSLLGAHRVLTGPSTGLPDGPGVIHVDRSDRHAHIVARIGRAEPMPGWAARPIGLEELVLAYLRRAREPRPAPSELEMSA

SEQ ID NO: 6268 - protein, 295 aa, synthetic construct; identical to SEQ ID NO: 6267
  REGION 1..295: note = TnsF-Tn7 System Protein

SEQ ID NO: 6269 - protein, 175 aa, synthetic construct
  REGION 1..175: note = TnsF-Tn7 System Protein
MTLPPHLVVMGVSGSGKTTVATRLADRLGRPFAEADDMHPPANVAKMSAGTPLTDADRRPWLATVRDWLTGQAEQGRGAVVTCSALRRVYRDVLREAAGGVTFVHLDGDPELLAERMAARKGHFMPSSLLRSQLDTLEPLEPDEDGVRVPIDGTPDEIVAEALRRLEEKAHRHAQ

SEQ ID NO: 6270 - protein, 175 aa, synthetic construct; identical to SEQ ID NO: 6269
  REGION 1..175: note = TnsF-Tn7 System Protein

SEQ ID NO: 6271 - protein, 380 aa, synthetic construct
  REGION 1..380: note = TnsF-Tn7 System Protein
MGSRDESVPGSVVSLRPANVAVLRPAEQMFDDMLAGWAGQQSSRLLSPVTIRAREGAVRRFAEFCATLPWEWTATDVEEWTAQLLSGPRPKAPSSIRGYQNAVALFCSYLTDSRYGWAEACLEAFGTHPVQVCHEWNTAIHVSDHEARPSVRPLTRMEVQALFDHADDRVDFARTSKRKGWTALFRDATLFKVIYAYGLRRREVAMLDLHDFTRNAAVPEFGAFGVCNVRWGKATRGSQPRRRAVVTVFDWTGPVLAEYVDDVLPRFKVADDAMLWPTERQSRVSGSYIGSRFAEYRDALGLDPVLHPHCLRHSYVTHLIEDGFDPLFVQQQVGHRWGSTTALYTGVSGDYRNSVLRRALDQAFTAPASASADGSEGQQG

SEQ ID NO: 6272 - protein, 114 aa, synthetic construct
  REGION 1..114: note = TnsF-Tn7 System Protein
MTTTVAYHWHLRTLMSEHGMHNTTDLVPLLADRGVVMTSTQVYRIVTGEPERLNMRLLSALCDIFACTPNDLIEPYVVATSTRRRKTAAEAAPAPRAASKNRPRRATVTATDES

SEQ ID NO: 6273 - protein, 452 aa, synthetic construct; identical to SEQ ID NO: 732
  REGION 1..452: note = TnsF-Tn7 System Protein

SEQ ID NO: 6274 - protein, 448 aa, synthetic construct; identical to SEQ ID NO: 730
  REGION 1..448: note = TnsF-Tn7 System Protein

SEQ ID NO: 6275 - protein, 452 aa, synthetic construct; identical to SEQ ID NO: 732
  REGION 1..452: note = TnsF-Tn7 System Protein

SEQ ID NO: 6276 - protein, 505 aa, synthetic construct; identical to SEQ ID NO: 609
  REGION 1..505: note = TnsF-Tn7 System Protein

SEQ ID NO: 6277 - protein, 267 aa, synthetic construct; identical to SEQ ID NO: 734
  REGION 1..267: note = TnsF-Tn7 System Protein

SEQ ID NO: 6278 - protein, 267 aa, synthetic construct; identical to SEQ ID NO: 734
  REGION 1..267: note = TnsF-Tn7 System Protein

SEQ ID NO: 6279 - protein, 385 aa, synthetic construct; identical to SEQ ID NO: 736
  REGION 1..385: note = TnsF-Tn7 System Protein

SEQ ID NO: 6280 - protein, 1168 aa, synthetic construct; identical to SEQ ID NO: 737
  REGION 1..1168: note = TnsF-Tn7 System Protein

SEQ ID NO: 6281 - protein, 1168 aa, synthetic construct; identical to SEQ ID NO: 737
  REGION 1..1168: note = TnsF-Tn7 System Protein

SEQ ID NO: 6282 - protein, 1168 aa, synthetic construct; identical to SEQ ID NO: 737
  REGION 1..1168: note = TnsF-Tn7 System Protein

SEQ ID NO: 6283 - protein, 1168 aa, synthetic construct; identical to SEQ ID NO: 737
  REGION 1..1168: note = TnsF-Tn7 System Protein

SEQ ID NO: 6284 - protein, 319 aa, synthetic construct; identical to SEQ ID NO: 741
  REGION 1..319: note = TnsF-Tn7 System Protein

SEQ ID NO: 6285 - protein, 368 aa, synthetic construct; identical to SEQ ID NO: 615
  REGION 1..368: note = TnsF-Tn7 System Protein

SEQ ID NO: 6286 - protein, 377 aa, synthetic construct; identical to SEQ ID NO: 743
  REGION 1..377: note = TnsF-Tn7 System Protein

SEQ ID NO: 6287 - protein, 114 aa, synthetic construct; identical to SEQ ID NO: 744
  REGION 1..114: note = TnsF-Tn7 System Protein

SEQ ID NO: 6288 - protein, 111 aa, synthetic construct; identical to SEQ ID NO: 745
  REGION 1..111: note = TnsF-Tn7 System Protein

SEQ ID NO: 6289 - protein, 110 aa, synthetic construct; identical to SEQ ID NO: 616
  REGION 1..110: note = TnsF-Tn7 System Protein

SEQ ID NO: 6290 - protein, 369 aa, synthetic construct
  REGION 1..369: note = TnsF-Tn7 System Protein
MTGVTRPDSTLTWLSRSKVRELLAQIAGNTGPLTHEILDQLPDGKTLAHLRSILVATNVLPPRDERLTALERWITTTVQNRTDPAERRILHNYAVWHHLRRLRQRLGENHTTRLQDLNVRCHVTAATNFLNWLGDNALTLDTCTQADLDRWITASTSSHRDETSHFLRWAVKYRHAHGLTYTTPYWTAPQGTPDTEKRWTDARRLLHDDTLATSDRVAGLLLLLYAQRIATITHLTIDHVRFHEDRVEITLGTSPIHLPEPLGAMVRRLVSTRRGHAMTGAPDHAPWLFPGGHPGRPISDERLGQRLQDIGLNPQQDRSTALFTLAGELPAAMLARMLGISVKVAVAWQRASSGDWTNYAADVASRKHP

SEQ ID NO: 6291 - protein, 348 aa, synthetic construct
  REGION 1..348: note = TnsF-Tn7 System Protein
MVEAMLRGFRAQQASRGLREETIAAREWLVRRFLIYTNEFPWRWTPSHVDEWSSTLTSEHHLAPSTIRGYQCDLRLFTEFITDNARYGWGDACEKAFGPGVHPMPIVHEWNSIAHLNGYEGNPEARPFTREELQRFLDYADDQVDRAVRARRKGALVAYRDATLFKVIYAWGLRRTEASKLDVVDWGRNPAAPEFGRFGMLHVRYGKAKRGQPPRRRNVASVMSWAVEAVADYVENIRPRFGCADHPALWVTERGGRIKPAEINARFESYRDALKLPKILTPHSLRHSYVTHLTEEGVDRRFIQVQVGHECDSSTAIYTHVSDDFMNTALRNAIAPALEPTAPYGKGR

SEQ ID NO: 6292 - protein, 114 aa, synthetic construct
  REGION 1..114: note = TnsF-Tn7 System Protein
MEQKLDYRWHLRRVMADRGMFSTTDLIPLLAECGITLSSSQVYRLVTERPERLSLKVLMALLDILDCSMEDLIEPAATGETARKPRKAAAGGTSAGEGVGLLRPKRARITAVDQ

SEQ ID NO: 6293 - protein, 249 aa, synthetic construct
  REGION 1..249: note = TnsF-Tn7 System Protein
MSLADHREIQAPIERFGRWYHLKRLRARSLPGKNMNFAVRSAKQEITESGRFLAWLLSEHDATHTDIRQSHLDDYLASGPSTRHAINTFIAWLVTSRDIAKVRVPRREARSTPILTQAARIDHIRVCLTAGEMPAADRVAALILLLYAHPVGKITALKTSALEARPDGLYLRLGSVPALLPAQVAATFWDYVHNRPNQQTVNTDSPWLFPCNLPGQHTHPETMLNRLRNWGIDLNGVRNTALRDLAREL

SEQ ID NO: 6294 - protein, 819 aa, synthetic construct
  REGION 1..819: note = TnsF-Tn7 System Protein
MTSLQSPAERYASARARAGRPQLELFRSGLRFELDPFQLAACASLEDGNSVLVAAPTGAGKTLIAEFAIYLAMQSPAKKVFYTAPMKALSNQKFQELVAEYGADEVGLLTGDTNVNPQARIVVMTTEVLRNMLYADSDLLTNLAFVVLDEVHFLADRFRGAVWEEVIIHLPQQVRMVSLSATVSNAEEFGDWLQAVRGETDVIVSEERPVPLEQHVLVKSKMLDLFDAAGLAGTHRVNPELVRLSQSGGRGAALRSPNGRRGGDRAGDRGRGPQHQRGGFEAGRMDRSEIVRLLEGKHLLPAIFFIFSRVGCDQAVRQVLRAGVRLTDAQEREEIRQIVDERCRTLLDEDLGVLGYFEWLDGLERGVAAHHAGLLPAFKEVVEELFQKKLVKAVFATETLALGINMPARTVVLDKLEKFNGEARVPITPGEYTQLTGRAGRRGIDVEGHSVIQWAQGLDPQTVASLASRRTYPLNSSFKPTYNMAVNLIEQFGREHTRDVLESSFAQFQADRAVVDLARKVRQQEQSLAGFATAMECHLGDFTAYSAIRRRLTKVERETAAGETGARAARERRQHELAGLRKRMRAHPCHNCPEREQHARWAQRWWKLRRDTDALTHQITTRTGAVARIFDRVTDVLLGYGYLVEVPTGVGLSPSGLILRRIYADRDLLVAESLRRGLWSGLDPAGLAAMACALVFEPRRDEGLIDERYLPKGPFREALHDTQDLWSRLDDLERENKLPGSNPLAVGLSLAIWKWARGGSLVDVLDEAEMAAGDFVRWTKQTIDLLDQLSVVADDPVGRTARQAMDAIRRGIVAYSSVV

SEQ ID NO: 6295 - protein, 819 aa, synthetic construct; identical to SEQ ID NO: 6294
  REGION 1..819: note = TnsF-Tn7 System Protein

SEQ ID NO: 6296 - protein, 370 aa, synthetic construct
  REGION 1..370: note = TnsF-Tn7 System Protein
MSVASGRVTHLPLRPEASSPDAVFTDMVDSWRRQQLSRNFRHETISGRERTIRQFADFTGHFPWEWTFADVEDYFAYTRSVSNLSQATVRAYQTNLKLFCDFLTDPAYDWSEVCGRSFGRPVTQIITEFNRATHTQQNEQQATKRPFSRRELQDFFDLADVEVERVINSGRKGAIAAYRDAIAFKTAYAWGLRANEVTHLQLVDFSRNPHSPQFGDFGVLHVRYGKAQKGSAPKRRSVLTVFEWSPEAVHRWIRTGLPHLAAQPTDLFPTSQGLVVPKSNLRRRFRAYVNELGFPAGLDMHSLRRSYVTHLFEFHGFEHTFVQQQVGHLHASTTSIYTAVSSDYQTRALNRVLERTINATTSSTPWEEKP

SEQ ID NO: 6297 - protein, 114 aa, synthetic construct
  REGION 1..114: note = TnsF-Tn7 System Protein
MKREIEYRWRARELMARHGMKNSRELVAPLRERGITLSESQIYRLVAQDPERISFKVLTALCDIFNVEANELVTFTAANAKSQRQERAIASGENIVNFADAYKPVRARILDDED

SEQ ID NO: 6298 - protein, 341 aa, synthetic construct
  REGION 1..341: note = TnsF-Tn7 System Protein
MRHKLSDLLTHPDHGIPDQLAQLIGIFDTVPRPANVMNWLQKRGSGPRLLRELALRAHTEPITHELLDGYPQGYALHRARDLLVHAGILLERTELLDRIDVWLDNLLREQPEYHAKLLRPFTSWQALRRARNRARHRPITRNAATYVRSQVTIALNFLTWLDAHGKTLDTATQADLDRWLDAGTQTNYFLSTFIDWANKRSLCDLTVPHRAGTEPDAFLDEDDRWSTLRRCLHDASLPLDIRTAGILVLLFGRTTTSFAHLTVTDLEQIDGDTYLRLGDFTALLPPAAAAVFHALGEASTARETFHRTEPHTRYLFPGRSPGRPASSHILARKLRAHGIKH

SEQ ID NO: 6299 - protein, 341 aa, synthetic construct; identical to SEQ ID NO: 6298
  REGION 1..341: note = TnsF-Tn7 System Protein

SEQ ID NO: 6300 - protein, 107 aa, synthetic construct
  REGION 1..107: note = TnsF-Tn7 System Protein
MIKKMGYQWNLRKVMAARDIFQTTDLVPLLAERGVHLSREQVFRLVTQPPKRLPMDALAALCDILDCTPNDLIEVEVVNVQVAKTAGDSSGPRPQARRTTIRRPGPA

SEQ ID NO: 6301 - protein, 345 aa, synthetic construct
  REGION 1..345: note = TnsF-Tn7 System Protein
MALGELPITHNAFAGLPSTRPANYVRDLLTASGVLPPYEPALERIVPWLTQLLTTLPREHADLVDRFARWKLLHRLRRLDTVTRGAAQHTRATILATTRFLTWLDTNQTTLTALTQATLDRYLADHPGTAPTLEPFLVWASGTGLTETFVIPTPKRPQPQVTVSHDERWRHVDTLLHDDTIRVYTRIAGLFMLLFAQPISRICRMRIDQVSIADTGAVSVAFDTDPIEMPAPLDQIIVDHLNHGAPASYANAGYWLFPGRIPGKHLVTESIRQELVYRGIHPSHARKAAMFHLAAEMPTPVLADLLGLSTTTATRWGHLAARDWNNYTALRHDTSDRTFRRHQQA

SEQ ID NO: 6302 - protein, 345 aa, synthetic construct; identical to SEQ ID NO: 6301
  REGION 1..345: note = TnsF-Tn7 System Protein

SEQ ID NO: 6303 - protein, 361 aa, synthetic construct
  REGION 1..361: note = TnsF-Tn7 System Protein
MVRLAAVRSVGAVRRLVSPQELDDFEQELVDQYVLALAAAGVTDDHIAQERSVIFAFIRFLGGYVWMAQPADADRFLREQRRGRARSTVHSKAGTLARFFEFLIGRYQGEIHGLTGHVVVQPVDEFNRPAKADYGGAIRVPPTEDEVDALFGRWREALPEARKFLPAARDYLAASLWRRIGLRINETIRLDIRDWRQDLGEHGKLHVRFGKGSMGRGPKPRLVPTINSTGELLEWWLTDVRHQFGDDWMDPEAPLLPSERRDRESGRCRRVGDDALRSGLAGAVRLWLPAWEGRLTPHGLRHFCASSLYSRGMDLKAIQELLGHEWLSTTTRYIHVHDDHIETAWVSANDRVATRLITGTE

SEQ ID NO: 6304 - protein, 105 aa, synthetic construct
  REGION 1..105: note = TnsF-Tn7 System Protein
MRWNMRMKAAEQGIWKSTEMRRRLAEAGLEISAGKMSALWTGTPTTIRLEDLDVICHVLGCEANELLIREPDKVAARRPRKAADNSTGVTPITPRLGRNRTLPPA

SEQ ID NO: 6305 - protein, 1416 aa, synthetic construct
  REGION 1..1416: note = TnsF-Tn7 System Protein
MRGWVLAGGMTATIHKVVAGNGYQYYLRNVAANDNSDRGRASLSDYYSAHGEAPGRWHGTGLATLSIGVGAEVTEAQMKSLFGLGRHPDAGDIEAREYDKQLALGAKPADAARAADKASRLGNPFRVYAEVSEFRKRCETAFREHNSTHGHDQTAAIPDHERSRIRTHVAFEMFSDEYGRAPIDARELSGWVAKNSRPRSTAVAGFDITFSPVKSVSALWALAPRSVSEKIEAAHHAAIDDALAWLERHAVFTRLGRNGIRQVDVDGIVAARFTHRDSRAGDPDLHTHVLIANRVRTLDGLWRTLDGAAIYRVVVTVSEIYNTRLEHHLEHNVGVEFAPRAEHDPGKRPIREIFGIPQRLIDAWSKREVALQVRLGELAAVFQQQFGREPVPTEMYRLAQQATLETRPAKHALRSLAQQRASWRTEAIALLGGREALARMVATALNPPRTGRITPTPEWVTRTARQVLEVVAEQRSTWREHNVRAEAERQLRGQITGRDWEHVVAAVVAEALSPQQSIALGDPDTTAEPMLAKVPAPLARRSGAHVHVRAGDQIYTSTTALAVEAALIELAVQPGGRSITPELVTAAVQDHNRAFPDRPLNAGQAGVIQAFATAGMRVHTANAPAGSGKTTAMKVLTNAWQTSGGTVLGLAPTAAAAAVLGESIGARVETVDKVLDVIARHTPNPNNVALDRELPPSLPQWVLDIDAETLVIVDEHVKLGNHKRLTLLQFLTSRGATIRCIGDDHQLASIEAGGAHTDMADAAPDHTLTLTHVVRFAASGEATASVGLRDGDPAALGWYLDHGRIHAGHAGAIHDDTYTAWAADHLAGRDTVMLAATHDTVTALNARARADRLTRGDAAPSAEVPLADGLCASVGDNIRTRHNDPRLRLGDQDWVRNGYTWTVTAVHTDGSITARHRQSGGKHGASVWLPAEYVRAHVRLGYAATIDSAQGITADTCHIALTGSETRQQLYVAMTRGVHANHAYLPTALDGTEGSFWSEPAIFPRTAVEVLLQILDRDRAQKSAHTQLRDALEPARRLGRAVDIYHDTLGIAAEHSLGADGLARLDNAAEQIRPGLTTCPAYPVLRQHLAIIAMTGSDPITALSEAAHARELDTADDPAAVLDWRLDTSGHHSTGPGPLPWLPGPPSIPDDHPLTAHLYARQRIVTDLADQIRTHTRDWTPATAPAWARPLLRGTDAGLVGELAVWRASLHIAERDHRPTGPARHANLERDHQHELDERIQHLLGDTNAATNRWAPVVEQLEPRLTLDPFWPIMAEKLDLAQRAGLDITDLLTTAAAIRPLPDEMPAAALWARLELEPSALDAPNSAALHPEWLPDLHAVLGAELTNHVTADPGWPRLVAAIDHTTPSTWTPHDLIATVYELLLAAQPDDAPALRPDQLTAALAWRIDALTHHTPT

SEQ ID NO: 6306 - protein, 1416 aa, synthetic construct; identical to SEQ ID NO: 6305
  REGION 1..1416: note = TnsF-Tn7 System Protein

SEQ ID NO: 6307 - protein, 345 aa, synthetic construct
  REGION 1..345: note = TnsF-Tn7 System Protein
MLSGWAVQQKSRLLADPTVQQRLSTVRRFRDFADVYPWQWTAADVEDFTVMLTSSPKGQRLAPSTIRGYHIALRMFCEYLTDPRYEWLRQCRDRFGELPSQVCHEWNTVSHLTSYEGAPARRPLTYDELEQLFDYLDDRVEVIAGSGRKGSLAALRDAQMIKTAYAFGLRRQELCCLDLADLRPNPHVRDWGTYGSLHVRFGKASRGGIPKRRTVLAVPEFDWAVDGMRQWVEQARPILNPAGHPALWITERLTRVRTKYIDRRFAQLRDEAGLPPDLTLHSLRHSYVTHLIEFGYPERFVQEQVGHAYASTTAIYASVSNDFKNRVLRRALDRVYCPPTEEASS

SEQ ID NO: 6308 - protein, 112 aa, synthetic construct
  REGION 1..112: note = TnsF-Tn7 System Protein
MTRRVVMRWHLRQVMATRGIFQTSELVPLLADRGIQLTRQYVHRMVTTPPQRINTDLLAALCDILDCTPADLLEPVVEQKQLSRTGTDEREGLRIGELRPIKATVRRPDTRK

SEQ ID NO: 6309 - protein, 365 aa, synthetic construct
  REGION 1..365: note = TnsF-Tn7 System Protein
MKWLTNPRGGARVLRELVERGIPVDHAALDAYDEREVWSLRRTLVDLGVLAERHDAIERLDATLERVVADLPGPTRQLVRAYGAWSLLRRARRRYERSGTFTCNQFRAAWTRLERVAQLLTWLDARGVALAHLDQATLEVWLIAASHDRRIAAADFLRWAARRGLAPRLHVAHAQRREPDVSMTDEQRWAQARRCLSDPTIPDDVRVAGALVLLYGLPLARIVELTRDHLQRDGSHHPTGLSVVAAGHVVLVPPALGRLLARLPHESSPRGVPLIPAPPSQPAWLFPGRGPQGHVTSTGLSDRMRGYGLTVRRARNAALISLAGDLPASVISDLFGLSIAASTGWARRAGRDWHQYLAEVRSEQV

SEQ ID NO: 6310 - protein, 347 aa, synthetic construct
  REGION 1..347: note = TnsF-Tn7 System Protein
MLQGWERQQEVRFLKAETVRRRVRIVRRLVEFSGLYPWQWTAAEVEEFIRTQSSGRAPIAVSTARSYTGDLRMFLEYLTDPRYGWREVCAHRFGQVPQQVLDEWNTVVHTSDYEGRPGRRPLSYEEVQRLFDAADDLVDLARVRRRKGALAAQRDAALLKTVYAFGLRRREAWGLDLVDLRANPKVRAFGRCGAVMVRWGKSQRGGPPRRRTVMLVPEMDWIVPVLQQWIDEVRPRFEPGKHPALWVTERRSRLDWRGINAAFAEARDAAGLDRQLDLHCLRHSYVTHLVEFDYPERFVQEQVGHAYAATTAIYTGVSDAYRNTLLRRAISAHQPDLWRDDVEEGTP

SEQ ID NO: 6311 - protein, 91 aa, synthetic construct
  REGION 1..91: note = TnsF-Tn7 System Protein
MFATTDLVPQLAERGVHLSREQVYRLVTTPPQRLSTDTLAALCDILDCTPNDLISVVAADASVPKAGNASPGPAGSGPVVQRTRIRRPNLE

SEQ ID NO: 6312 - protein, 385 aa, synthetic construct
  REGION 1..385: note = TnsF-Tn7 System Protein
MELQTPNYAAMKVEQYFPFFMKVDTMFTSRDSVCGQKLLKTFGPNGLRIFTTPYDYLASLGIFTPLTRDEIRAEAEKRRQNMYVTQARGKWFEKEMIAFQEHLETIAKRYADRGWKGKNARFRPRTLSSALQVAIRFYNHVDSCGIISHRQIHQDIVDGFIFQNPGYKQPLRTLVTYLNRHGKVFRKLKIEMVNLNIPTDMFLAPDKCNELIKNWLCSEGKETKKGVIGIFMLMYAQQPSKLVRLRMSEIQRNEKGIYSVAFGSTELELDPRISALFDRYLEHRHALSMMEDDLQNEWLFPGRKYGCHMTSSAVSYALKDMGVSADQLFATSIYNAYQSGMRHPKVLVNAYGISTLTAIKYLKLLDPRMYDEADSASRSQQYVAN

SEQ ID NO: 6313 - protein, 379 aa, synthetic construct
  REGION 1..379: note = TnsF-Tn7 System Protein
MPRKHVQVVQTQANPLNIPEKEQALLNAIIKGYEQRRLGALNHTEKAVQGDLRTLNDFLTYIQKAPWNADEDDFDAWCYHIGIERKLATESQRKYQTAIQQFFRYFANNVKFRAEIMNSFGVQARQIVTEENKIPHKNENQNTNERPAFTHLQIEQFFDTIDEQIVEAYRFRSKEFLILQRDKAMFYALYILALRNSECCGLTTKSFRENPGTPEFGDFGFATVFGKGSNGSGPKIRTVPVDNVNLPPILQWYVDEVRPRFLEKPHCDPNTEVFFLTERGTHLSPKSLIYRFNKILKYAGLEGLGFVPHCLRHTYTTHAAEAGYSVEYSRRKLGHEYSATTQGYTHCGDEFVNKQLNEYNRSQIDNALQSKDTNGGGEK

SEQ ID NO: 6314 - protein, 112 aa, synthetic construct
  REGION 1..112: note = TnsF-Tn7 System Protein
MYHDMLFTGSPGVGKSMLAHRLPGIMPPLTMQQALEVTRIYSVSGDTSRPAMSRQPPLRQPHHSASDVAIIGGGSNPKPGEISKADHGILFLDELPTFQYYQYSNQGRQYTP

SEQ ID NO: 6315 - protein, 112 aa, synthetic construct; identical to SEQ ID NO: 6314
  REGION 1..112: note = TnsF-Tn7 System Protein

SEQ ID NO: 6316 - protein, 700 aa, synthetic construct
  REGION 1..700: note = TnsF-Tn7 System Protein
MINFPVITNLSIDNYELYPGKDGNGLSHSFMPGVTVIAGVNGLGKTTLLNVLFRLLVGPSDWRANNTANGIGNIRHMLTGWKNKKYFAERVMDEAHNSRVSATIKFGKDKIEIVRKLKDLSIVEFSHNDVPQSTDHNHYQNIVCGISNVGSFFDFYFVLKYLVFFLEDRTSSIWDKKAMDGILRILFYPRGEAKKFAELRDNIQIVDSDRRNFQAHASKLSKELLEALKKEGQGDSFGKELGSLSIQINAHLERKKELEGSIAQADVHRNEARQKHARAKLDLEEKQRNHQELQENYFSNLFPSIENIANYVLVNLDSGSGCLVCGSREIGLVEHIHRKIEDGKCPVCDTSSEHHENVIPTQKIEAVRLDKVALEIEHKRETLKGLNEEISRISSDYDALLKEQLDVNQQLRSAQEKEALMQSKMPTSSDKIERLKRQVKDNTETLNERLSNQRQLETESKAMLKIGFEKVKGIANEIETNFNNYIQSFLAEKCELRFQPMMDKVANDAERIEFPRFTIRMTSNTSPKSPQPRSDRNSVSESQAEFIDLAFRMALIKTVSTHSAAMMILETPEASLDSIFIGKAGMLLNGFADDGKGSGNRLIVSTNLNKEDMIPALFGVPPEDEVKRWHESSPSSPFPMARSVIPRDERERRVINLIIEARESASIQQYRADYEYRYKEEVFPSWEALLSSFNEGHENE

SEQ ID NO: 6317 - protein, 700 aa, synthetic construct; identical to SEQ ID NO: 6316
  REGION 1..700: note = TnsF-Tn7 System Protein

SEQ ID NO: 6318 - protein, 235 aa, synthetic construct
  REGION 1..235: note = TnsF-Tn7 System Protein
MLPLLRTRAERKPITPAARRHVADQVKQATAFLGWLADRDHTLATCGQTGVDAWHVEHNEYAPNSIRCFLLWCSASKLTRPFRLSPAQISRAAPMPQAERLELIGRLLTDPSLPLRARVAGGIVLLYAQPLSRAVRLTLDDITCGDQQTLLRLGEPPSPVPEPLAELLFRWIDNRDNMKNTGTNACRWLFRPPSRATAPPRRPGGSPQRHRHPHHRRPHRRDPAARPGDARPGRR

SEQ ID NO: 6319 - protein, 658 aa, synthetic construct
  REGION 1..658: note = TnsF-Tn7 System Protein
MLGERLRDLRRRSFVGREREVRLFRSALADFGLVFVHGPGGVGKSALLDMFADIAADAGRSAVRVDARHLRLGPDVLPALADGEVLFIDTYELLEPLDDWVRERYLPSLPGDALVVIAGRRAPSPRWYADPAWRHLMREIALGNLPPADGQAYLAAQGVPEKLHDRLLAISHGHPLLLSMLVDAVGKGAEPYRLGDVPSVVGALLAQIVDEAPSPLHRAALELCAHAPVTTADLLRAVLGDEAEKLFAWLRTLPFIDDGPNGLYPHDVARDALDADLRWRDGARYAEMRRRLSVALRARILATADEREQIQLLADVIAVEGSRSKVATCSNPPATMQAYADTLQDGDRAPIIAMTTAWQGEEQAELAAYWLDRRPGAFRVFRTVSGEPRGYAACLELTETDLGVDPGVNAMWRYAHEHGAPRTGERVRAWRFFLDRDHGQLASPSVTLFAACQTLDALTHHNTAWTLVGAYADPALWAPTMHNLGFEPAKGAEYTIGSTRFPVFAHDWRRTDVDEWLEILHARQAGALATAADGTDNTVLSEPQFAEAVQAALRDLRTPNLLQENPLLRSRAVRQNQRDGNAPAETLRELLETAVSVLPPNLRVLADRTFLHPVTTQERIAESLHLSFNTYRRHRDRAVTSITEWLWAAETGHRTSRP

SEQ ID NO: 6320 - protein, 658 aa, synthetic construct; identical to SEQ ID NO: 6319
  REGION 1..658: note = TnsF-Tn7 System Protein

SEQ ID NO: 6321 - protein, 631 aa, synthetic construct
  REGION 1..631: note = TnsF-Tn7 System Protein
MAHDPGTGSEPPTRTADSGDSAARLRTETADEARKFLVDSIVHLAGTPDRGPAWAEALLRDAGLWSTRAARALAAHLADYPDAFTAPRPDCPLALVRLARHLEHRGLGALVTQPACARCGRDDVALPRTTEDGRCCQWCLSQPYARPCARCGRRLPLAAGRHTGGPVCRGCHADAPRRCRVCGRAEAPRERTECDACRAPHNVREGPARPAAPPAGTCQGCDTMQDVYADGLCVRCLTRRCIRELLTSTGRDPRDPADPDPRDPADPDPRDPAAADPRDPAAPGVHPDLVPLAAALENAVQPHSVLTWLRRGASAALLASLAADPAPLTHERLDAFPNDHSTRCVREMLVATGTLPRRDEYLARSAQWLRAASRCWPRHHRDTLLAFADDALDRGAGRHTAERATRDRAAIRAAADLLAWLDAAGLDLADLDPAFMAAWSAGTTPGRRRAVPAFLRWTADTGRSKTVRVPQQAAADPVPRPARLAAATGRTAEDPGLPVDVRIIAGLAQACGLTAAQICRLTHDDFRHGPHGMSLAADGDEATVLPAPLAALIRGRIERAPRTSILAMPGVAPDYLLPGRPPSRPRNVASLQQLLRRHGISLHRTAAATPRGQAAAPPPPHHRTANDGGTP

SEQ ID NO: 6322 - protein, 631 aa, synthetic construct; identical to SEQ ID NO: 6321
  REGION 1..631: note = TnsF-Tn7 System Protein

SEQ ID NO: 6323 - protein, 537 aa, synthetic construct
  REGION 1..537: note = TnsF-Tn7 System Protein
MTVRVSDCVKCGRGVARADRDLCARCHWAARNAPAKHPCGRCGRQRVLRPETGRCVRCSRSCRRCDAPVLFKGRDLCSRCRRRELREQAKSDCPRCGKRGVLRDATGWCGPCSRPGRPPNPEAACHDCGTVTRLTGAGRCHRCWSRSPHRVQVRAANLADTLDDAPLWLDGFANYLTPRLHPQRACAMLTRLGRQLTATGGVHPQALLDRAADTDAALAGWLEDFFTRNRLALPLDWEERRAAGRRRRRIAAIPEPVRPAAEAFAEHLLAKRERARRAATHPRKHATIDARLNAVRDFAIFLHTERGKTDWATVDVTDIEAFLPDRPSRRASHLGGLRQFFGFAARTRRILVDPTRTLTAPQPWGFRGPTLTRERERSLFRRWSTDPAVHPHEALVGLLALLHGATTSEICDLTDEAIDHHGRTVRIGRRPRPTPLDPWTWAALQRCLDHRQDLGSGNPHLLVTTRTKATRAAPSDGYVKHTLDPVGIQPRILRSTRLADLVTTVDAKLVATAYGMTSDGVIAYLADHVDTARLPNP

SEQ ID NO: 6324 - protein, 350 aa, synthetic construct
  REGION 1..350: note = TnsF-Tn7 System Protein
MSAGRLQVIQGQAAPTVRTLDPARFQAECVEEFVASWMARGFSDVTITKDVGVLERMLAALGRPAWEVTAEDVDRVVGSLASQGRACSTRRHYVQAFKGFHRFLEVRKATEIEAAFGIRLRCPVDEFNAARHVGEDSTAELAPPTPERVTGFFDFLKQRIATARKYGPAARDYALFRTLYHAGVRSEETVMLDRPDTHFHRGPFGKLHIRFGKGARTSGPRPRWVPMLDGLDLVLRWFLTDVRGRFPDSPVLFCDESGGRMAAGTIRNRLRHLMQLEGRPEAEWFSPHGLRRACATHLYERGVDLVAIQQLLGHWTVSSTLRYVRPSETFIEDAYQRAISATLTELTEGD

SEQ ID NO: 6325 - protein, 350 aa, synthetic construct; identical to SEQ ID NO: 6324
  REGION 1..350: note = TnsF-Tn7 System Protein

SEQ ID NO: 6326 - protein, 107 aa, synthetic construct
  REGION 1..107: note = TnsF-Tn7 System Protein
MRMRIRWKLRMAAAQREVWTGAQLKRLLAEKAGLEMSSASVSALFTKQPSQIKLSTLIALCTALDCTPNDLFEVDTTPIEQPTTTAPEAKAVGDNPNAGRGRSMPPL

SEQ ID NO: 6327 - protein, 107 aa, synthetic construct; identical to SEQ ID NO: 6326
  REGION 1..107: note = TnsF-Tn7 System Protein

SEQ ID NO: 6328 - protein, 223 aa, synthetic construct
  REGION 1..223: note = TnsF-Tn7 System Protein
MPRLRLPPTARTGGAPIDQQRLALIRRVLIDSAVPDVDRVVGLLILLYAQPLNRIARLTVDDVLVDGDDMLLRLGDPLTPVPEPFAEVLARYVAHRSNQTTATNPNSRLLFSGRRAGQPMHTTSLRLHLRNLGIPNMDSRSAAIGALLLRAPAPVVAGMLGYHVVRTEAIAADAGATWKRYAAGDHARRAVTAPSVGTPQWTRRGSPAWPGTGLMFEGTIFLT

SEQ ID NO: 6329 - protein, 235 aa, synthetic construct
  REGION 1..235: note = TnsF-Tn7 System Protein
MVDEAPPPSYSLSSVEFSCVLPMLHGLTTVDWPTERRDTSGHRWVAETSVYVADGHRGRGVGKALLAQGSHRRRPRRTPWRSVIYVRDLLIAAGVLPPIDRFLFLFEQWLPGWLAAIDDPDHRKILNRHAAWHVLRKLRRVAADGPIGGYRNNNARQQLKMAAVFLTDLADRGRDLAGCTQAELDRWFAGHPTATDQSLSGHSCAGASSSAGCPGSGCRPPRAPVGLPSTSSAWH

SEQ ID NO: 6330 - protein, 467 aa, synthetic construct
  REGION 1..467: note = TnsF-Tn7 System Protein
MAKAAAKAARAARGSEPEPVERSGGGAGGGVARGENLPEVNAVYTQPSAATPEVGSPNPPSDVNDVYTAALPDQQDAPEERVQACRTSTCTFARTPETFSTHRGLALPTDQAERLAVGRRKCRVDAVPESFRPAVAAFDASRMRARDRARRASTRPRSNLTLEAALATMRDLAVFLTDQRGKGDWALVDVHDIEAFLATLPRARKRRLTVLRQFFGFARSQRVILVDPTRGLTAKEGNGYRGRTLTLDQQRHLFRRWTCNDGAHPHEALLGMLALLHGASGSEVRMLQVTDIDPATQTVRLGKRPHPVPLDPASWAVLQRCLAHRAAWPTQNPHVMVTKGTKGGRRPASTAHLSHVLDDCGYPPRMVRGTRLVDLVNTMDPKLVAAAFGMDPQATLIYLADHIDPTRFARPAPAEELTCGTLPPPWPSAPSDAGSRSSSSWGPSKATSAPGFAGSPSAPAQRASPST

SEQ ID NO: 6331 - protein, 399 aa, synthetic construct
  REGION 1..399: note = TnsF-Tn7 System Protein
MASQNSGGEKEKVASKLPASLRQELKTRAAQLGIDMQDAVTQAVEQWRARPADNNPTIDTAGAESWNTWLPVGLYNAFKDDCLDRDISFVQGLAQAVRVWIDSHTVSLSELTIPRYTRRIIVCNQKGGVGKTTIAAGVGQAIALGLPASTGASKLPALPGLRTLLVDYDPQGHLTSQLGVKQIPPGEESLVTHMVDRDRVAGALLDQVVPIEPDHFEGRLSLLPSSFDAFLLDSRLGSIRGPREASLQRALAPLEEHFDVIVIDAPPNLGLAMDAGLYYGHRRNNEPADASGVLIPVEAEDSSADAYAMLDSQIRTVSLDYEVDIDRLGLVVNKFDKRKGYVATHSLENWQSLGTPPVVSVVPDLKEQREAVHVKQPLLVYAPTSIQAQRMREIRRGIA

SEQ ID NO: 6332 - protein, 275 aa, synthetic construct
  REGION 1..275: note = TnsF-Tn7 System Protein
MSSTLSTEQKPALAVEFRVPIPQGTVGTDKLLQALAEDVRPRRLHELSVLCEHKMRLPIWAARLSVARPHHLRRSGPLRRGLTNHHLASERKPGMADWRDRMTPDDHAMVAAHAPIARGTLVVLIGPAGSGKTTYTRAVPSSQVVSLDDLRALVTGGDPGDQSATAAAAQIHDLVLEGRLLRGRTVVCDSTNVEAAVRARLVERARRHGRPLLAIVMTTPLDTCLRRNSERPPTRRVPDDVLRWQHQLATEALPGLADEGFDEVRLHPAVSRSGR

SEQ ID NO: 6333 - protein, 275 aa, synthetic construct; identical to SEQ ID NO: 6332
  REGION 1..275: note = TnsF-Tn7 System Protein

SEQ ID NO: 6334 - protein, 781 aa, synthetic construct
  REGION 1..781: note = TnsF-Tn7 System Protein
MALSGYVTRDHDHVLAGTVRQAAQGASGMLVLVGSSSTGKTRACWEAVQPLAARGWALWHPFDPSRAEAALADLERVTPRTVVWLNEAQHYLGHPEAGERIAAALHTLLTHSARRPVLILGTLWPEYASRYTALPNPGAPDPHTRVRELLAARTVSVPESFDRNALHAATALARGGDHLLADALTRARAHGRITQDLAGAPELLRRYDHGTPAVRALLEAAMDARRLGVGLQLPQAFLTDAAADYITDHAWDQLTEDWAEAAFADLARPVHGKQAPLRRTADRPPLRPPGGPVTVAAFGSAAGPMFRLADYLEQHGRSTRTWRCPPASFWNAAHTHLTRPDDLNRLAESAEIRHRLQWAHYLRRRAADAGHFGALTKLVWMRENTGDWAGAETLYQQAAEAGHTDALMDLAQRRENSGDREGAEALYRQARDAGSTNALTGLARMRERAGDRDGAEAFARQAADAGNTDALTSLAQRRESTGDREGAESLYRQAAQAGDTNALADLARMRERAGDRDGAEAFMRQAAATGDTYALIVLTRMRERAGDLEGAEDLYRQAADVGYIDALVDLAQRRERAGNVEGAEDLYRQAADAGSTNALTGLAWMRERDGDRKGAEALALQAAGAGNTDTLTSLAQRRENTGDREGAEGLYRQAAGAGSADALAYLTRMREQTGDHEGAEAFARQAAEAGSTIALSSLARMREETGDREGAEALAWEAAEAGHTDALVDLARMRDRAGDRESAEILYRQVADAGRLYLYLVNRERWPYGLDPDGSPTPPWP

SEQ ID NO: 6335 - protein, 781 aa, synthetic construct; identical to SEQ ID NO: 6334
  REGION 1..781: note = TnsF-Tn7 System Protein

SEQ ID NO: 6336 - protein, 468 aa, synthetic construct
  REGION 1..468: note = TnsF-Tn7 System Protein
MKDCSQCGKSVAKYHRIYKGEGYCHSCYVRMFKLCVCSSCGEKKRIHYKEEKLICETCHNNKPCIRCGKQEYKIGKITVYGPVCNSCSPYFRQKKPCGYCGAMSTKLTKTEKNGTGLSICPKCYRQEKGYENCSQCRKNRLLIETEHVRICKKCHEVGLIDCKVCGIQMPAGMGSTCDSCGWLKRFKQRVHLLKFTISAEQVRVAFIKFSEWLLQDVGSNKAVMTIELYVPFFVEVTRFWNKLPSYELILQHFKPKGLRKYLKVKQWLHILYQENFQDSKKTDLAEGCRIDALFAKIADQPIIYELLQGYQSELMAKLHAGRTTLKSVRLALQPAVGLLLRTHQIPTQSEISHYLSEKSGQKAALTGFINYLNRKYGKHLVCNHSEEERIQVQQRKKKNLENEIIAFLIKSREESKPIYVIDWIMVSMKYFHGCTYRTSSKFEIKHGQYVVFQDGKDYVLPFLERGIP

SEQ ID NO: 6337 - protein, 468 aa, synthetic construct; identical to SEQ ID NO: 6336
  REGION 1..468: note = TnsF-Tn7 System Protein

SEQ ID NO: 6338 - protein, 215 aa, synthetic construct
  REGION 1..215: note = TnsF-Tn7 System Protein
MYKSVRKIGPTKRSVSGYYSFRNKASIPYESSLERDFVMLHEFDDNVIEIISQPVSIPFALNGGNYKYHPDYLVLFQNCTKSGMLVEVKPESEWRENWRIWRTKWKAAARWAKKRNFLFHIYDESRIRGQELDNIKILHSFKRTAFNEQEIQKAYDFIENSGMISVADYLVQFPVAQHARQSQLLWQLLAKKILVTDLSLPLNKDSMIEVSQYGR

SEQ ID NO: 6339 - protein, 636 aa, synthetic construct
  REGION 1..636: note = TnsF-Tn7 System Protein
MEDNSKESMIPLNREQVDFSVGASVIHIPSGKNYKIKRQIDFSYIECQCSETGRLMVLPILSLSKSNNSLQVSYPDLNSIEPDDWKEAERRYNLILPLLNGEISGRKEIDEYAKNKGIGRATLYRWFGVYKATRSVSSLIPKQRGWREGNSRLTFEQDKIIHDVIQEYYLSPQRLSQHEIFNQIKIVCSQRNLTRPTKNSIRKRILSLSAKDVLYGRGQPKKAKDKFAPKAGMFPNVLYPLDVIQIDHTPVDLILVDDLNRQPIGRPWVTFAIDVYSRMILGYYLSLDAPSEIAVAMCIAHAVLPKEEWLAAKEITGEWKVWGIPKKIHVDNGPDFRTETLRRACLEYDINLEFRPVKVPNYGGHIERLVGTFMKETHKLKGTTFSNIQERKEYDSEKYACLTFDEAEAWILKQIVSVYHKEIHSTLNMSPTSKWRDGIYGTDYEIGCGLPHVPANPKTVMLDFMPFEERTIQNTGVTWDGVRYFDFILAPYIGLRGEDGKARKYIFRRDPRDISIIYFLNPDTKNYIPIPVANQNLPSTSLWQLRASKKRLKERGLKDYNEHQIIETLIEMEKIVDNAAAQTKKMRRMRQRSKIHQKNVTPVQPIEKQKRPENEAPIKVDGLLDTDFIQPFEDIQ

SEQ ID NO: 6340 - protein, 360 aa, synthetic construct
  REGION 1..360: note = TnsF-Tn7 System Protein
MKRSLLRSPHLIDDETLSSWLVRTALYQGCDPMVLSWRIWDKYRIWTIDFERNLAHEHLLALSKATGLQIDVLDQMLLIHLAKKCVHEFHAESAIWSWILCQGIRNRKKSVGQQYCPHCFAEGIPYLRKEWRMAWATVCIKHQISLQDSCPECGFYFLPHKLQGLEHVLCICHHCGFDLRNSQGIKANSAFQKAAQAAIQQGNINCGTNFLLVAEWFAVAKVFVLLLRKAAAHKNGRFANIFADLGVSLETLVLPKTVGTFEWLPIAERHGLLRDCYILLQQPLEKLIDIAQSHSLSANAILNVVSQDKLPQTLFPLVNGLERQSKNYSKRQCKDDPVSEKIVMRKWARLQRKVHRIIAS

SEQ ID NO: 6341 - protein, 294 aa, synthetic construct
  REGION 1..294: note = TnsF-Tn7 System Protein
MMHKFSHIHPKFQHIVVLSDDERIEFINTARWIGYQAAKDILQNLEDLFNFPKRPRMPNLMIVGESNNGKTTLVQHFYEKYKEPYETEDLELVIPIILIEAPSTANEKALYISILEKLVAPYRQTASTEILYTQALHLMRTYSVKMLIIDEFHSMFTGTARKQREMMNALKRLCNELRIPIIGVGTENAVNILFTDKQFASRFDVAELPVWPLDSDFQRMLVSFEQILPLKHKSNLHDPKIAQAIYYKSDGNLGNISNLLAKCAIKAIRNGSEIIDLDLINAQQDFRSTIKGRV

SEQ ID NO: 6342 - protein, 294 aa, synthetic construct; identical to SEQ ID NO: 6341
  REGION 1..294: note = TnsF-Tn7 System Protein

SEQ ID NO: 6343 - protein, 282 aa, synthetic construct
  REGION 1..282: note = TnsF-Tn7 System Protein
MDQAVFATSTMQDTFGEFGYWLEAKVGPHKAALTIHRYLSFFLQIETEWKHIPTYIELLEHFTAEGLRRVRLPMQWLREARGVEPDPNVRNNDSERRRIQVLIDTFPKSSWAAQALNSYLNELMARHSTGRTSLRSVRLALRPAVSLLLAMDTREHSLPSQSVLDRYLLEAPGQKAAITGFIRFLQAAYGLNLVIRIDAKKTREARRHKLEQEIIQMARHPEEGDEFLRRWISVGLEYFHRVKMSKRTVQSATIAEDNDGLRVTVNGNSYFLPQWDTPAGRL

SEQ ID NO: 6344 - protein, 586 aa, synthetic construct
  REGION 1..586: note = TnsF-Tn7 System Protein
MNDAEFKKSLSRYLDANVCDHLLGVDTCESELPKVPLDNFFGDEVLSLLYRSKDPGSRTLSKTKAMLEVVSDPRAARHLRAEAAVALGRFVQARQPDDFFSELGRSHPLQWYRLARQLNSVVGALAFANVILAQHGQHVEFDLDVDPLPRLKQDKKASTPLQTIHVGREVPQAWYLGARVAVRHVQRRFTGWGSEDFGCAFACIVNYLTLLSAFHLENLKLQIAQRHEALDWLKPLWNRLIQAAPEQARDPEQYHAALVEQQLAVLLRLDDLEQGRAELHAPRPIAMAAPANSDHIVVIKGEIPKSSERNEADYLKQYEVLRSPVGLTPLPDMETLAAIRKALEGEFPWAGEAISVVMSELIGRRRHGVMRLGFAPVLLVGPPGTGKTRFAQRLSDLFGTPNTVINMAGMCDVKVLKGVTRGWASNRPSRIVEFIQQTKVGNPLFILDEIDKASSAYGHGGAPQEALLDLLEPGNARRYQDIYLMTECNVSHCLYIATSNSLAALTEPLLSRLRPVYFPPPGPEHSEVIVHGVLADMERAWGLPAGVLEVTPRQLADLQGLAPREMRCALLAMLGRDTETSIYTLH

SEQ ID NO: 6345 - protein, 586 aa, synthetic construct; identical to SEQ ID NO: 6344
  REGION 1..586: note = TnsF-Tn7 System Protein

SEQ ID NO: 6346 - protein, 282 aa, synthetic construct; identical to SEQ ID NO: 6343
  REGION 1..282: note = TnsF-Tn7 System Protein

SEQ ID NO: 6347 - protein, 231 aa, synthetic construct
  REGION 1..231: note = TnsF-Tn7 System Protein
MTEIAETKFPPDQVRRIKPTRRSVSGVCMFRGEVAVEYESTLERDFILREEFSLAVLGIVPQPCQIEYRAHSGRKHVYTPDFLIYYRLGSRSYEDYPKPVLIEVKPAAEWRKHWRQWLPKWKAAYAYAKQQGWEFHIRDESRIRDQALQNITFLSRYKRMVFPAEESQAIVETVEQMGTVTVDYLLARHFMGIYRTEGIAHLWHLLATRKLDCDISQSLSNHTELWVPHDE

SEQ ID NO: 6348 - protein, 643 aa, synthetic construct
  REGION 1..643: note = TnsF-Tn7 System Protein
MTNDNALDHANDADDIYKPSRQRIDINVGAYVRKADTIYKIVQVLDFNTVIGVAVESGRSAPLAIPHLRPVEWEPPESSQDLSEIADADWQEAERRLAAIRPFIDQLVIGRGEVDAQAKTIGVSTATLYRWIERYRGTGSPMGLIPQKRGWRSGKTRIPAFAEAVVEEAIKDFYLTAQRPSAQKTIIEVQRRCQMRGIEPPSPSTVRSRINQIPERMRLRERGYREKAKNKFMPTAGKFPNADFPLAVVQIDHTPADIILVDDLHRKPIGRPWITLAVDVHSRMIVGYYLSFDAPSEASVAMCVAHAMLPKEEWLLLHGVDSEWPVWGVPKTIHVDNGPDFRSGTFRQSCLAYGINLEFRPVKQPRYGGHIERALGSVLTEIHTLPGTTFSSIKDKEGYNPEKHATMTKSEFETWLVTLICKVYHERLHTGIGMSPRKKWDIGIFGNSEAQGVGLPPRVADRLSILLDFLPSFHRTVQTFGVTIDGMSYYAEALRPWINAAEPEDRNKKRIFVFRRDPRDISSIWFRDPTLHQYFKIPFADQSIPSMSIWEYEQVKAKLRKEGTESINDAQILRAVTELRTQVDESKGRTKTARRQAQRRTEHEKGVSPASPKKAVPHPQPSAPTTVLAELTTEDIEGFGDIA

SEQ ID NO: 6349 - protein, 595 aa, synthetic construct
  REGION 1..595: note = TnsF-Tn7 System Protein
MAYRAWTKIDDGSEGAWNADVWLGLIEAVARHEGERVYDKDAPIYAELEANLPGLKWKDIDNGIFRPYFRDFSKPWAITGVVTFDDTFQLTTIGRQVAEGTLSARDCMMGFCESYTENDEYPFCILASGFLNAGKPLSLEEVFFGIETAYRPGVDILADTLDTAQAQVGSDIPSTPKRRLALMLKILERAGGISSGKVWRVWDKAILARLAASKDNAQQIPPEEAKSTILGIDSAFADSAQLANLALTSTLPRNFISSLLAKPFLILTGLSGSGKTKLAHAFAAWISASSDQYRIVAVGADWTSNENILGYQDALQAGRYCKPTTGTLDIILSAARDPLKPYFLILDEMNLSHVERYFSDILSAIESGQEIALHASPYNLKSSDVDEAGIPAKIKFPSNLFIIGTVNVDETTYMFSPKVLDRANVIEFRASSADISIFLKEPKAVALDALAGMGASYALPFVAACARQDVQLSSLDATVTGGMDIAALLNNKLVQIFEGLAEIGSEFGFRTAIEINRFVFFHAYLAGPGWKLNDALDQQVLQKLLPKLHGSERRLGPVLDKLHTFCATNECVYSLKKISRMQDRLKDGFTSFAEA

SEQ ID NO: 6350 - protein, 595 aa, synthetic construct; identical to SEQ ID NO: 6349
  REGION 1..595: note = TnsF-Tn7 System Protein

SEQ ID NO: 6351 - protein, 207 aa, synthetic construct
  REGION 1..207: note = TnsF-Tn7 System Protein
MAHHGVLFLDEFPEFQRRALEALREPLETGYVSIARASGSIVFPADFQLIAAMNPCPCGWLGHASRPCACTPERMDQYRARLSGPLLDRIDLYLALTADINNAGLRDSMGESSAHVRARVLQCREIQYARQGMPNAALGPRDLALYCVLEHDAQAVLARAAMRWAWSMRAVHRVLRVARTIADLERADDLQVTHIAEAIQYRLNEPG

SEQ ID NO: 6352 - protein, 361 aa, synthetic construct
  REGION 1..361: note = TnsF-Tn7 System Protein
MPWAIHTPLQPDESISSWLARTALLQGCDPLALTGSVWPGLRTWSVDIDRGMSSAHFQALSLACGIGTAHFKQAALRTDAERIAGRVLADMGCWPWILTLGSRNRKRHSGQQFCPSCLASDTHPYFRRRWRFAWQVACTQHSLGLIDQCSTCKAPITPHQLVAEDRQLIFCSHCHADLRKMPAIPASDSALAFQQTADQVMGAGAGLFGNRTITMTDWFGTARFYASLIRRVACQKESRLVTGIRSLGVNTNTSNLPITGLPLELLPVADRTPILNAVQQLMVLGSEPLHTALSRNGITAASIHDSRSLLPGPLKEMLTTLPSGRRTTMHPRHPGESRPRTEAAVRGAWMRLQRKVKASLQ

SEQ ID NO: 6353 - protein, 296 aa, synthetic construct
  REGION 1..296: note = TnsF-Tn7 System Protein
MSSYEHIHPSFRDVCIAPARDRIAFMNEPRWIGYSAANQILETLRGLMEKPARPRMPNLLLVGEPNNGKTTIVRHFFDLHGQGYVNEDAEPVKPVVLAEAPPSADEKGFYISILERFWAPYRATDPVAKLRYQVVHQLRACHTRVLIIDEFHSLLTGTAIKQREVMNAIKFLCNELMIPIVGVGTREAVRVLHTDPQHASRFDVISLPLWQLDRDFQRLLASFEQVLPLHQPSGLSQPELASTLYAVSNGNLGDLHRLLVACATAAITSKAEHIDLATVKSKVWLQPTRGIREVVL

SEQ ID NO: 6354 - protein, 296 aa, synthetic construct; identical to SEQ ID NO: 6353
  REGION 1..296: note = TnsF-Tn7 System Protein

SEQ ID NO: 6355 - protein, 601 aa, synthetic construct
  REGION 1..601: note = TnsF-Tn7 System Protein
MLQRTDVCDICKRLRLIHRTFDGLHYCDACYGRLFVRIGCAQCGASIRVPQQHTVRPLLCTRCQNANRTCIRCKRPITRAALVIEEGPVCSSCSWHYKEPQPCAYCGTLSQRLSRCHRLGITEPACPACVRRDNRTCSICGKYRQVYLLTDTGRPVCKSCSANTKTGFLCPRCGKLGRRHSSSSCLACYHRDLADRKLAQVLPIFSHEWAREAFTQFFTELRARRGDLAAAAAHDRHFAFFLKLDTNFPDPKKIDAESLVKAIDLLKLRLFDLPLNFLRREGLIADFSHVDLQDTAYHAAQQRVLDAASGHWYATVLERYATKLSERHKRSRQRGWIGKHARFLPRTITNYLRTAHRFLAWLDQHDVHAVQGIERQKLDAFLVEFPGLRDGLRPLVQYLNDHEKLFAKVRIETRPKNLPQEILLPDHQYHSLLARWLSAADDELREALMGLMMTLYCQSLKKTVSLELAQFQQTSDGQIRAQFGKHATLLLEPVAKVLTRYLEQRASPSTFLREATSPYLFPGRNVNAPLSPLTASRRLHQKYGVSAAQLFTTGLFHAYRGGVQHPKVLVTNLGISMITAMKYFELLSPQLRAEYARLTGN

SEQ ID NO: 6356 - protein, 393 aa, synthetic construct
  REGION 1..393: note = TnsF-Tn7 System Protein
MNLAKQSAATDRKTERAIAALPPAEAVLVRQMLDAWTQHRLGALRHTQESVATSTSSVTDFMLHACKAPWNWTEKLFDDWCYEIGVVRANAESTQRKNQIAIREFLKYLCESVAFQNQVRLKFGRQVQQICSSRNMLPHKVDRELKTERNALSRAHIEQFFAEIDEQIQIAHQFSSKSLRPLQRDKILFAVMYYGGLRADEALTLNVTSFHEDAENPVMGKYASATVWGKGANGSGKKMREVWFTTLDLPPLLEFYLTNVRPHFLKPTNPDERALFLSQRGTRLDYSSLYRSFGKILHACGFHGMGYCPHSLRHSSVTHEGARFSLSYNRDKHGHVYATTTEHYYHGGSEANGEELSRALQTQIDIAARQSAQSESKEGVPPPEPRAARARRN

SEQ ID NO: 6357 - protein, 601 aa, synthetic construct; identical to SEQ ID NO: 6355
  REGION 1..601: note = TnsF-Tn7 System Protein

SEQ ID NO: 6358 - protein, 103 aa, synthetic construct
  REGION 1..103: note = TnsF-Tn7 System Protein
MRASLETEAWWLYLLLCSDNSIYIGIAKNADARFGMHCRGCGARYTRLHRPVRLLARQSFPDHKSAAQAERAAKRLTPSQKRELARSLGASEASLFVGEAQRE

SEQ ID NO: 6359 - protein, 213 aa, synthetic construct
  REGION 1..213: note = TnsF-Tn7 System Protein
MRWLVQTGVVSTDEVLRKQSSEWRRVKQVLAEVSAPWPASLLGGYFKVLSARLEQGRSSILSVRLALRAAASFLTSCDLAAGTFPAQKDLETYWRTSPGQVAALTGFASYLNRHYALQLDAQPDGKWLKRAKKAKSERALVELLHETPKRPEFELRWICAASAYFHDRKLRRKELVYTPKKYEGVDGYEIEVGQDLLWIPAPDQHELVTALNL

SEQ ID NO: 6360 - protein, 580 aa, synthetic construct
  REGION 1..580: note = TnsF-Tn7 System Protein
MVELVIRTGFTYARSDLRHPDSDVARLKRDSIVWWYGNFRTPKGGSAIPRAALTFRTLYNDVPGPFVSAVVPLSSLPHYQVGTIWREGQCISDTLQTVREFQVDFAPGGWSLTSRAELVAKGQAHTFPEAEYALHWHNRDQCKLLVFPLPNERQLIIPCIEFFLRAYFRNIQAGRLLTTKTWSGVMENFFSTQAKSETNWRVEPTAKMRKYDSTLLSHILYDPYTEKVAKRFNAQFISKPPETRIFPEVEPWFRGTATVRCKGRWVNNGNTFLCLSLIGCSVPKGPIIEWITPEFDSTDGIDGAGRFILPQSVRTAEEEELLHEESFLEPDGHAETTIVRVPPFESIGTPRTIISSRKTIKGNKSNVGPHPPKAETFADAEGSGTGRNVGKLEHVAEAPLESHGFLRDIWNAFKSLQPANSERISEVNWYTPNLGFQRNDNIQLIQILPIEDPSVDHEVRIWPHTNRDTSKQRGIMAIRVKIDNYNYFCLEIQRDTIDKDRTTIAKYAGALITEQITYEALNELLERICTTLPYALGRFKRMRSTLTKNTIIFKHTHTTGDVIYRQRLINIFKEMKINLE

SEQ ID NO: 6361 - protein, 213 aa, synthetic construct; identical to SEQ ID NO: 6359
  REGION 1..213: note = TnsF-Tn7 System Protein

SEQ ID NO: 6362 - protein, 181 aa, synthetic construct
  REGION 1..181: note = TnsF-Tn7 System Protein
MRFSHRVFSVVAQPCQIDFIDTSGRAQIYTPDYLVYFHQGDVSASQFIRPMLVEVKPAYEWRKNWRAWMGKWKAARRYAREQGWTFAIYDESRIRGLPLDNIVFLERFERMSFDQEDIDMVLKTVCDMEVAPVHYLLARHFGGHYRGKGVSLLWHLIAARQLECDIIEPLDEYLELWVPSL

SEQ ID NO: 6363 - protein, 640 aa, synthetic construct
  REGION 1..640: note = TnsF-Tn7 System Protein
MNIYDVDTDEHLISFEPSRARVTIEVGAMVRRDKQVYQIAQLLDLQSVIGVEVETGQSASLRISELTPVEPEKLDGLYVNHDISTISSDDWAVAQKRFAAIKPFVSNTVAPKSRVEERAKEIGVDYTTLYRWIERYRDWNEVLALVPRKRGWNPGNSRISYEAEQLVREVIDQHYLTIQRPSIQSTIREIERRARAKGITPPGASAIRARIKRIPEKHVLRQRGYADRARNRHTPSVGKFPGADYPLAVVQIDHTPVDLIIVDDAHRKPIGRLWLSVAIDVHSRMITGYYLSLEEPSEISVGMCIAHSALPKESWLLLHKVDGEWPVWGFPRVIHTDNGPDFRAENIRRSCSNYNIESVFRPVKRPKYGGHIERLLGSFMRMVHEVPGTTFSNTHDRDGYDSDKHAALTMEDFEEWLVRSILRYHQQLHTGLYMSPARKWQLGFFGNRELDPLVSIPPRPADPLTVQLDFMPSFHRTVQAYGVQIDVFYYSEALRHWINTKDPETGLARKFVFRRDPRDISVVWFYDPVLKQYFRVPVAYQAFPAATLWEFKAAKRKAVSDGRANVDDALIAKLILENRELVERAAVNTKTARRAAQRAKVHSKNSTPAAPQKVATVALVSAPSDDGLLLDDIDLIGDIQ

SEQ ID NO: 6364 - protein, 296 aa, synthetic construct
  REGION 1..296: note = TnsF-Tn7 System Protein
MTDYSHLHVDFRPVLMLSDKERIRFMGEPRWIGYQAAHNILDTLESLLDAPKRPRMPNLLIVGDSNNGKTTIVRHFVKNHGEGYIDEHSEAVRPVILAQAPPSADEKDLYAAILETFWMPYRRTDSKLVLRYQVIHTMRELKVRMLIIDEIHSMLTGAVAKQREVMNALKMLCNELAIPIVGVGTPDAVQVLHLDPQHASRFDVVKLGTWKLSADFQRLLKAFEAVLPLKQASGLFRPELAQVLHAISGGNIGDLHCLLIECAREAITSGRECIDRPLIESKTWLRPTRGIRERLA

SEQ ID NO: 6365 - protein, 296 aa, synthetic construct; identical to SEQ ID NO: 6364
  REGION 1..296: note = TnsF-Tn7 System Protein

SEQ ID NO: 6366 - protein, 650 aa, synthetic construct
  REGION 1..650: note = TnsF-Tn7 System Protein
MKAGKQTPRVREVAKLVQPVVPGVPVERLAELVIEVAPAPVTQRLLELALLKQPGLLQGQCRNVPVTVQDLAHALVQEGASRVVLPTCESCGRALRLPHKTSGGGRRCSRCERNARSTACAKCGQVKPVQRNIEGQRFCRKCWRADLRSFADCSRCGRYATTVVRRSETVCLDCYRAPIKTCGLCGNRGSIASHLDGRRVCARCYYAMRSPQPCPECNRKVMLTGLIDGMNVCAECAGTPVTMACPGCGSISEVRKHHLCVECRRPIMIQQLLADETGEIRDELAPLAHYLLTYHDKALSLERWLRNTGSAAPLLRELVTGRLPLEAGAINSRARSPQGAVFILSLLVQSGVLPEMDVPSMRFERWLESWLDGIGEPDDCLVLRQYCAWEVLGANKTSTSRSQYQNARMALNHCARLLLEIRSQEASLMTYPQRMLDAFLTGSPVQRDALAPFTRWLRRQGLSRLRVDFRPRILEGRDYAADHRMQMARKFISDTDMHAATRVAGLLVLFYGLPLTRISSITQSQINADSLPVTLTVGNDPIELPEPLGDAIVRQLGLARRRSDSWLFPGRVPGRPLTAGPLGIRLRKEGLMSGSARTTALIELTRQLHPRVVSDLLGITSARAAVWSRLAGGEWSDYPALRATPTRPQA

SEQ ID NO: 6367 - protein, 375 aa, synthetic construct
  REGION 1..375: note = TnsF-Tn7 System Protein
MHLMTDYRESLTAFRLLPSASNVSLVKPEQQVYGAMMSGWENQQLSRGLRQQTIDSRTAIVSRFHEFIDKPPWKWTVADVDEFTADAAGRSLTLSTLRQNHGAIRTFCDYITSPLYDWMEICDHQFGEVPSQVCLPWNTVAHRFEFEGDGKRRPLSYEEVERLFDTADARVDKLALSGRKGALGALRDAQLLKTIYAFGLRRTEAVMLDTVDLHYSSKMRHWGRYGALHVRWAKAAGGGAPRRRTVLLVPEFDWWVPGMRQWNEQARARFAPGGDLDALWVTERRTRVSAGYLDRRFADLRDEAGLSKALTLHSLRHSYVTHLLEFGYADRFVQDQVGHMHASTTSIYASVSSDYKNRVLAEALKTLTEGEADDH

SEQ ID NO: 6368 - protein, 112 aa, synthetic construct
  REGION 1..112: note = TnsF-Tn7 System Protein
MTIELETDWHLRNMMATRGIFQTTKLKPLLEERGIDLSREQIYRLVTHPPQRVRIDVLAALCDALDCSLNDLVTITRRESTALPKAVGEEPTRGSIGDLRPVRATIRRPPAK

SEQ ID NO: 6369 - protein, 583 aa, synthetic construct
  REGION 1..583: note = TnsF-Tn7 System Protein
MSDDEDRAANDDVQHVVDALRRHDPQVQPELIAKLVEQVAPGPRTRKDLLTYLREHRDVVTQGGSRMPKVVGELFYAAIAAGVKGVVSPACASCARPRTLFHNTTDGQRICPSCYNRTRRAICSMCGQERHVASRNSEGGALCGTCRNAGKADGECAGCGRVMQVRRSKDGLEYCRRCASRRAPTESCASCGRVTRVNARQPDGSGLCAACYAKERQAVALCDACGQLATLVARKGGRGGHDRNLCGRCYRHPHRECGLCGRTRRVALRATETSPDVCPTCYWAPVVLCATCGQEGLGRRTTNDGDPWCFACQAATRVDEFLADEQGRLRRGYAPVREALLEMDPRSVLHNWGRVECFRLLGDLLSEHGEVTHELLDAEPQVFSVHYLRGVLVSAGLLGERDEHLARLRVFCEDVVAEVDRVSERQVLARYAQWYVIARLQIGPGGLTANQAYNARSEVRSAQGFIAFLNLRGVGVRDCRQRDVEEWALEGRSLHFVRWLKRQRFLPASVAITTPSVASSPQTGDPDEQLELARRLLHDPSIAGVEERVAGTLLLLYAQPVARIARLTLEDLAEVEGRMQVKL

SEQ ID NO: 6370 - protein, 517 aa, synthetic construct
MEMCGVCGRVRRGQRIDGGRGPFHCDSCVPREARKRTARECALCDRGKTVRIFWPMGPVCGPCYRAALSTPTQCASCGRQRVLVGRAAGGGLLCRTCVFPGEPPERCGACGEPADLLPGRRCPRCTLAARVTDLLSVDGAGVPEPLQPLAAVLTGADNPYRVLEWMRRSPAARLLRHLALQPDALDHQALDALPHRAVTAYVRGLLVTAGILPPRDENLALLTNWAARTMTALPPQHAALIRPFAEWHIIRDARRRSARGRYTYVAHKGDCGNIRAAIDFLNWLDSHRLSLAALEQRHLDTWATGRPSLRARSIPFIRWATARRLTATGLLIEHPPAQLPGHFQVEAVHHEELRRCLNDTVLPLDVRVTGALVRLYALPLTRIVELTADQLHRNEDHTYLTINRHPVLLPPKLAHLIDDQLRHSTPRHSGPHEHRYLLPGHIPGRPRNPAGLADTMRRHGLPARAARNTAVMEALVDLPPMVISDLFGIQPKTAERWATLAAGSWADFLAVREGNQG

SEQ ID NO: 6371 - protein, 581 aa, synthetic construct
  REGION 1..581: note = TnsF-Tn7 System Protein
MTTTPSAPEALTGERGPRGPALLSVRGLRVAYGTAEAVRGVDLDVRPGETVALVGESGSGKSTTAHAVVGLLPRGGRVTEGRVFFDGADLRTVGEKELRARRGAHIGLVPQDPQLALNPMQRVGRQVAEALLIHGLATREAARGRAVELLGEAGLPEPAVRARQYPHELSGGMRQRVLIAIALAARPRLLIADEPTSALDVTVQRQILDHLQGLARELGSAMLLITHDLGIAADRADRTVVMAEGEVVENGPTRAVLGSPDHPYTRRLLAAAPSLSSARLVAPRPASAAGEPDLVVAEGLVKDFPLPRSVGRRTLRAVDDVSLRVARGETLALVGESGSGKSTTARLVARLTAPTAGTVTFDGTDITALSGGALRRLRRRVQVVHQSPYASLDPRFTVAALIGEPLRAFRTHGRAARVRRAAELLDRVALPASALRRKPGELSGGQRQRVAIARALALEPDLVICDEPVSALDVSVQAQILELLAELQRDLGLSYLFISHDLAVVRQIAHRVGVMSEGRLVETGTTDDIFAAPRHARTRELLAAIPGTTAPDAAVPGAGAAGRLAKSPAAPAHSRQERRSP

SEQ ID NO: 6372 - protein, 581 aa, synthetic construct; identical to SEQ ID NO: 6371
  REGION 1..581: note = TnsF-Tn7 System Protein

SEQ ID NO: 6373 - protein, 108 aa, synthetic construct
  REGION 1..108: note = TnsF-Tn7 System Protein
MIRKMGYEWRLRQTMAEQGMFQTSDLVPLLAERGVTLSREQVYRLVTQPPQRMSMDTLVALCDIFGCTPNDLIKPLVVNAQVRKTADGETGPLPLKERRTQIRRPGRP

SEQ ID NO: 6374 - protein, 367 aa, synthetic construct
  REGION 1..367: note = TnsF-Tn7 System Protein
ANTDPERLMAWLDRSSAAAVLQALLHAGEPPSHDALDEHLPSRSVQYLRAVLVNAKVLEPRDEYLAVLEWWLPGELARIHDDAERRVVASFARWHHLNKLRSRSRRRHLSYSEHFYVRKQLRATIHLVIWLRKQDRALGTCTQADLDRYLASGAGNRYLCKKFVDWATRRGHTRKLEISTVDHQSAGVKAIPEDERWALLRRLLHDDQLDPVIRFSGLLVLLFAQPASRIVRLTTDQIIITTKGKTQILIGRKPLDLPPPLDDLARQLLHRRRGHALLGHTGENRWLIPGGAPRQPLTEGALLLRLRPLGILTRPARNAAMMDLAAQLPAAVLSHLLGLSDPTAADWVQEAGAYRAAYAADIARKTS

SEQ ID NO: 6375 - protein, 842 aa, synthetic construct
  REGION 1..842: note = TnsF-Tn7 System Protein
MNDAGDRPSRFLTDPLTVITEAVTAIEPDLDRDLVVRVVTDVAGRRPEQRLLAQALHEAPDLLTSGSPEGPRRIEWLVRALQQEGAERAVRPACAVCGVIKQLICTTPDGRRCCGSCAARRTQPLVTCHGCGRERPGAVRVRSGELICARCAQVQARTEHRPFLLEHLAKLETGLDEQVLARVIDGALPLGYQRRVVCWELDANPALLSMNAAKGSLRLVALADALIAAGARGVAAPACVLCGQAGQRLRHTLEGRRCCRRCFNQDRQEPCSRCGKRRLSAARTPAGEPLCEWCNRSDPVNHERCTGCDMVTLIKHREGDERLCRKCWPGATATCSICGQTRPCYFADTASARCNPCTRRLRTRPCSSCGQSKIVCTRTADGEPICYTCGRIPRSCQGCSEVKIIAARLPEGSFCQRCYRQHPASKRTCTSCGVVEQLHHHGLCVRCAARDRLHQWASQEDGSIPSAVAPVVQALANTDPERLMAWLDRSSAAAVLQALLHAGEPPSHDALDEHLPSRSVQYLRAVLVNAKVLEPRDEYLAVLEWWLPGELARIHDDAERRVVASFARWHHLNKLRSRSRRRHLSYSEHFYVRKQLRATIHLVIWLRKQDRALGTCTQADLDRYLASGAGNRYLCKKFVDWATRRGHTRKLEISTVDHQSAGVKAIPEDERWALLRRLLHDDQLDPVIRFSGLLVLLFAQPASRIVRLTTDQIIITTKGKTQILIGRKPLDLPPPLDDLARQLLHRRRGHALLGHTGENRWLIPGGAPRQPLTEGALLLRLRPLGILTRPARNAAMMDLAAQLPAAVLSHLLGLSDPTAADWVQEAGAYRAAYAADIARKTS

SEQ ID NO: 6376 - protein, 372 aa, synthetic construct
  REGION 1..372: note = TnsF-Tn7 System Protein
MVDAPPEPPGSARLVLQQGVRLLHPEDVVYSAMLDGWGMQLRGGRRLRDRTVKAYRRDVERFFVFSAEYPWCWTASHFDEWMTTLISERGLARSTLRAYQLAVQSFCDYITSPHYHWAKECEARFGTHPVQVCHEWNTVAHLVDYEGDPARRPMTRKEIPLLFDYADDQVENAVRLRRKGALAAYRDATVFKAIYGWGLRCQETSKLDLVDFYRSPEAPELGRFGKLHVRWGKASRGSPPKRRTVASLMPWAVEAVEDYVVNVRPRLGFPEVAALWVTERGNRLRPREIESRFAEYRDELGLPSDLTPHCLRHSYITHLIEDGVDAKFVQEQAGHRFASTTAIYTAVDGDFMNKMMRKALDKALTTEEELAT

SEQ ID NO: 6377 - protein, 166 aa, synthetic construct
  REGION 1..166: note = TnsF-Tn7 System Protein
MRPHLCPVVVDLSARLFVEPRLLWEKKDLPGGLAPSFITHSAGFLLNVGWPVIIEGILSATFYGSALRGLIAAHRGRTLVYFLQVELAETFARHASRPEAAEFSTADVTSWFEPDDWLDVPGEIVIPQTSTLPTTVNRIYQDAQIDRLTTSSSAPIDDVRPAAGGQ

SEQ ID NO: 6378 - protein, 166 aa, synthetic construct; identical to SEQ ID NO: 6377
  REGION 1..166: note = TnsF-Tn7 System Protein

SEQ ID NO: 6379 - protein, 117 aa, synthetic construct
  REGION 1..117: note = TnsF-Tn7 System Protein
MTAKLDYRWHLREVMATRGMFSTTDLRPLLAERGIDLSASQVYRLVVERPERLSLKVLMALLDILGCRMEELVEPVAARGAQRRRKVAGESASPEADLRGVGDLRPKRARVVTDRDE

SEQ ID NO: 6380 - protein, 517 aa, synthetic construct; identical to SEQ ID NO: 6370
  REGION 1..517: note = TnsF-Tn7 System Protein

SEQ ID NO: 6381 - protein, 517 aa, synthetic construct; identical to SEQ ID NO: 6370
  REGION 1..517: note = TnsF-Tn7 System Protein

SEQ ID NO: 6382 - protein, 581 aa, synthetic construct; identical to SEQ ID NO: 6371
  REGION 1..581: note = TnsF-Tn7 System Protein

SEQ ID NO: 6383 - protein, 581 aa, synthetic construct; identical to SEQ ID NO: 6371
  REGION 1..581: note = TnsF-Tn7 System Protein

SEQ ID NO: 6384 - protein, 108 aa, synthetic construct; identical to SEQ ID NO: 6373
  REGION 1..108: note = TnsF-Tn7 System Protein
